United States Patent Application Publication US 2026/0357256 A1 - sequence listing, part 21

SEQ ID NO: 9 - DNA, 58617616 bp, Homo sapiens (residues 43,420,461-45,591,483 of 58,617,616)
  source 1..58617616: mol_type = genomic DNA
atggagtcacaccaaactgccccttattttgttcctaaatatgtagctgcaaagatttagaagtctacacacctccccagcaggccttgctcacaatttggccacaaggaaattccttgtgggccccaagatctttaccctaaaacagttctgcttgagtttcaccctggcaatgtaattaacagtttatcttcacaggtactggacaagacaggaccagaagtcatccctctgctcacctgagacaaatgcctatttcactctttcctctactagatgtttagtttattttatgtaaaaatgcaaatctggccagacacggtggctcacccctgtaatcccaacactttgggaggccaaggcgggcagatcacgagctcaggagtttgagaccagcctggccaacatggtaaaaccccatctctactaaaaatacaaaaatttaccaggtgtggtggcagatgcctgtaatcccagctattcaggaggctgaggtggagaatcacttgaacccagaaggcagagattgcagtgagctgagatccggccatcgcactccagcctgggtgacaagagcaaaactccgtctcaaaaaaaaaaatgcaaattcactgagggcaagatgattgcatagttgactattcctctaccctctcctttcacatgtaaaatgtagattcactgaaagctgatcaaagcctcaaaagaatgcaaccactttccctttttatttactctcctcctttttttctttcctctttctcctattgcccactcctttccccactttaaatattgaagtccccaggccgggtgtggtggctcatgcttgtaatcccagcactttgggaggtcgaggcaggtggatcacctgaggtcggagttcaagaccagcctggccaacatggtgaaaccccgtctctactaaaaatataaaaaattagctaggcatggtggcggatgcctgtaatcccagctactcgggaggctgaggcaggagaactgcttgaacctgggaggcagaggttgcagtgagccgagatcatgccactgcactccagcctggcaacaaaagtgaaactttctctcaaaaaaaaaaaaaaaaaaaaaaaattgaagttcccaaatcctctttggaaaaagcacagatcacagatgttcctgtggttttgtgtttctttttcctgggcatgtcctaaaccttagcaaaagaaactaaaataattaagactcacctcaatcattttttttttatttataccactctcctgcagtttaagcgctactctagctaattccttatctttgtccttaggtagccagtccccattgtgtcagtttgctaaatctccctaaagaggaagaagaagcacacgaaaatcaaattttaactgagggccaggtgcagtggcccacacctatagtgccagcactttgggaggccaaggcgagtggattacttgagctcaggagtttgagaccagcctgggcaacatagtgaaaccccgtctctacaaaaaatacaaaaattaactgggcatggtagtgtgtgcctgtacatagtcacagctatttgggaggctgagacaagaggatggcttgacccagggaggtggacagtttgctgaggtcacgccactgcactcctcctccctagatgatagagcatgaccctgtctcagagacagagagaaagaaaaaggaagaaaggaagaaaaagaaagagagaaagaaaggaaggaaggaaggaaggaaggaaagaaagaaagagaaagaaagaaagaaaagaaaagagaggaaagaaagagaaagaaaaggaaggagtgacaatgccaaattctggagaggaattgagaaactagatctctcatatattgctgtaagaatgtgaaatggtgcacccactctggaaaatagtttggccatttatttaaaaactaaacacacacttaccatctacccagcagtcatactgctgagcgttcatccacaagaaatggaaacttaagtcaacacaaaatcatgtatgtgcttgttcttagcagctttatttgtaatagcccaaaatgaaaacaaccaaaatgtcttacagtaggtgaatgttaaactccacaatagaaagaaacaaactatttatacacacagaaacttggctggatctcaatggcattatgctgagtggaaaaaagtccatctcaaaggtcatatatgtactatatgaatccatgtatataatattcttgaaatggcaaaatcatagcaatagagatgtattttatttaactgaatggtatatccaaaatattaccattaaacatgtaatcaatacaaattttaatgagctatcttacattcttttttatactaagtcttcaaaatgtggtgtgtatttcacaatcatgatacatcttaatttggacttgttacatttcaagcattcagtatccacatgtggctactatatgatatagtggctactgtattgtacagcacagatctaaataacataaaatgcctcttcaaatggatggctcttttttatcgtgatgtttattttattattgagttttgagtatgtttcatatttgcatattacaaatgcaaattccttaacaggtatatcattttaaaatattttcttctactctgccttgtccttttcttctcttagtgtctttc[137 bp omitted]gcctcctgagtagctgggactacaggcttacactgccataccaggctaattttttgtattttagtagagatggggtttcactgtgttgtccaggctggtctcgaactcctgagctcaggcaatccacctgccttggcctcccaaagtgctgggattataggcatgagccaccgcacccagcagagcatgggtttttaatttaatgaagtccaatttatcaactttatgaaatatgcttttagtattatatattatacattagccaagtttgttattgcttgtttgtttgttgttgttgttgtcactgctattctaagtcgtttgcatttccaaatgaattttagaatcatcttgtcaattactacaaaaatcctgcaaggattttgattgggattgtttgaggagaattgacatcttaacgttaaggaaacaggagcataggagagccagggtgacaccattttaaaatcaaccctgtcgtaaaactagcaaggtacgctctttgccaatcacaacccacggtcataagatgtttacagctaaagaagcagtttattaatgcctgcaaggacaaactcctgtgacagaagaatgtccagatgtcccaatatcacataacaatatatactttcaagacagagtcatgctttggtgtacttatgcactaaaatgccaagaataacttttatttatttatttatttatttatttatttattatttttggagatggggtctcgctctgtcacccaggctggagcgcagtgacatgatctcagttcactgcaacttctgcctccccggctcaagcaatcctcccacctcccacccccaccctccagtagctgggactacaggcgagagccaccacacctcactaatttttgtattttttttgtagagacaggaccgcaccgtgttgcccaggctggtctcaaactcctgggctcaagcgatcctcccaccttggcctcccaaagtgctgggattacaagcatggtccactgcacctggcagataactttccttaaatcagcaaaataataaattttgtcatgctgtcagcccactcacacatagacataacttagcttagcttttatat[135 bp omitted]tgaccaacatggagaaacccggtctctactaaaaatacaaaatcagccgggcgtggtggcgcatgcctataatcccagctactcgagaggctgaggcaggagaatcgcttgaatctgggaggcagagtttgtggtaagccgagatcgcgccattgcactccagcctgggcaacaagagtgaaactctgtctcaaaaaataataataataatttttaaaaagacagcgcattctttctcttgctttctgaggcaaccctactgtgtaactaatgagcaactctgttgccaccgcactctgtgactcaccttgaattctttcttgcataagatccaaaaatcctctcttggagtctggatcaagacccctttttccagcgacattaataatactgtgtcttcttccccattcataccatatatcttttcatttatttcacaacagtgctgaaataaatgaaaagatatatgctatgaatggggaagaagacacagtattatttcacagtgtgaaatttccttcagcattgttgtgctgtttccagtatacaggtgttggcagggatatagaaaaactggaatgcatatattatgggtgggcacctgcatgagatcccaagaaacagcaactaggccagggtgactggagcagaggaaatgaggaagagcatcttaggagatgtggtcagaggtaacgggaatacagatctcagggagctcataggcaactgcactgactctggcttttatgccaggtgaatttggaagttgttagagagtttagatcaggctaggtgtggtggctcatgcctgtaatcaatcctagcactctgggaggccagagtgggaggatagcttgtgtccaggagtttgagaccagcctaggcaacatagcaagatcctcatttctacaaaaaatttttaaaaattagctgggcatgatggcatgcacctttggtcccagctgctgaggaggctgaggcaggaggactgcttgagcctgggaggttgaggctgaagtaagctttgatcccaccactgcactctgcctgggtgacagagtgagactctgtttaaaaaataaagaaagacagagagattgagggaggggagagagagagaaaggaagggaggaagggaggaaggaaggaaggaaagaaggaagggagagagggagggggcagtgcagagggagggaggggaaaagaaagagaagagaagagaaaaggaaaagaaaagaaagaagaaaaagttagtttatgtcagggtgtgatacgatgttttgacttctcttgtctaaggagccctctagctgctatgttgagaatagtctggaggaagacaaaattggcagtgggagacccactaaattgctgtttgccacgtttttaaaagctgaatagcttagatcagtagtttaggagatcgacaagacttgttttctggtcacaacgctgctgactaaaacaggatttagtccagacaggataaagtgaagaaactggacaaaaccagcagatgacagcaaaagtgaccctagctgccctcattgctcattagctcaagacactgcccccagcaccatgacagtttataaacgccatagcaacgacccagaagttaccacccatttctatggcaatgatctggaagttgctgcccttttcctggaaacttgttaaataactcactccttaatttgcattaatccacaccttaatttgcatgtaattgaagtggctataagagaatataaatgtagttgccaagggttcacaggttgccaactctgggcacactgccaatgagttatccctgctcagcaaggagcagtaccattcaataaaagattactgcctaatacccggggctcgcccttgaattctttcccggtcaaagccaagaaccctcccagcctaagcatcatgttgggggcctgtccatcctgcatcagtttttttgttttgtttttgttgctgttgttgtttgtttttgttttgttttgttttgagacagggtcttgctctgtcacccaggctggagtgcagcggcacaaacgcagctcactgtagcctctactttctgggctcaagtgatcctcccatctcaggctcctgggtagctgggcctccaggcacgcaccaccagagctggctaattttttttttaatttcgtagaaacagagtctcaccatgttactcaggctgtgctcaaacttctgggcttaagcgatcctcccacctgggcctcccaaatttctgggattacaggtgtgagccactgcactcagcgtgcatcagttctaactaccaaattgaaaggaacttagaggagaaaagagcatgttaaatgcctgtggggatggaactagcaaaatccagattatggaagctgcaagacaatgacctaactttgtcaaaacataaatttgagagaagaagaaaaaaaagtaagggaagctatagtttaagaggaacttaaacacacaaaatcaaatgcaatttgtggaccttgcttggatcctggcttgaataatcagatataaaataatacttttctgatacagctaagaaaatgcattcattgattatttaatgaggtaggtatcttaaattctattagatatgagaactgagatcatgtatttcaacatgacttacctgtttgtttgactttcaaaaaagccttgcctggaaggataagactgtaaaacaataaagaactcattgtttgcttcaggaaaataaaaaaaaaaaaaaatttatctaggcaaacaatttgctcacctgggcatatagctctcctctcaacacatggctcaactgggcaaaaagctcacttatcagacaatagtttgcttctcaagacttctctcaagacctccattctgttgtgttcaccaattctaaactatcgtctcatactttttatccaattttattttattttattttattttactttatt[246 bp omitted]aatacccttacatcattttcccctttgtgacactgttgagacaccaccgaactttgttctcccttgctgcaattggccttataaactcttactttgcgtgatcaatgggtttctctggtagtctttgcaagaaagtcaaccattaatagatacgctgatttcatgacatgtttattttaatttttttattttcttgtaactttatcgtcacagaatgt[133 bp omitted]gaaaccccatctccactaaaaatacaaaaattagccaggcgtggtgacgcatgcctgaaatcccagctactcaggaagctgaggcagtagaattgcttgaacccgggaggcagaggttatagtgagctgagattgcaccattgcactccagcctggggaacagagcaagactgcatctcaaaaaaaaaaaaaaaaggttgggggaggcttatctttttaaaactatatatacagaatggctgggcatggtggctcacatctgtgttcccagcattttcggaggcca[133 bp omitted]tgaggcaggagaatcgcttgaacttgagaggtggaggttgcagtgagccaagatggcaccattgcactccagtttgggcaacagagtgagattccatctcaaaaaaaaaaagaatatacatatatatatatatatataaaatctctacacacacacacaatacacacacagacacacacacacacacagagaaggatttacaaataaaatgaaataatgtctgagatttacttcaatacaatatggaatagagagtagggagaggcatagatgaagtgaaactggtcatcatttcgaggcaatcattattgaagctggttgacagctacatggggttcactataagacttttgtctggccagacgtcgtggctcacgcctgtaatcccagcactttaggaggccgaggtgggtggattgcctgaggtcaggagtttgagacaagtctgacctacatggtgaaacccagtttctaatttaaaaaattacaaaaaaattagccaggcctggtggcaggcgcctgtaatcccagctactccagaggctgaggcaggagaatcgcttgggctcgggaggcagaggttgcagtgagtcaagatcacgccactgcaatccagcctgggcaatgagagtgaaactccttctcaaaaaaaaaaaagctttttatctacttagatatatttctgaaacagtccataataaatgagttttatgtgtgctactcagaccacaacattggagttattcttgatctccctctcctatcccatatccaatcctttagcatatcctgttgattctgcctttaaaatacctctagaatctgaccatgtctcataacctccgctgcttcttctccagtccaagctgccaccatttctcaccttgattattgcaacagccaagagtctctatgctttgacctttcccttcccacaatcccattctcttctcgacttagcagccacagtgatccttttttaaagtaagcctaaaccctgtctcttagccaggcatggtggtgcacacttgtagtcccagctactcaggtggctgaggcggaagaatcgcctgagaccaggagttcaagactgcactgagctatgattgcgccactgcactccagcctgggcaacacagcaagaccctgtctcaaaaacaaaataataaagaaatgaagaaataaaaaataaactcgctctctatcaaaaccctacaatgactctccacctcactcggagtaaaaaccaaagcccatggccaggagcggaggctcactcctgtaatcccagcagtttgggaggctgaggcatgaggatgacttgaggtcaagagtttgagaccagcctggccaacatggagaaaccctgtctctactaaaaatacaaaaaattagccaggcattgtggcaggcgcctgtaatcccagctacttgggcaactgaggcaggagaatcgcttgaacccaggaggcagaggttgcagtgagccgagatcgcgccactgcactccagcctgggtgacagagcgagactctgtctcaaaaaaaagaaataaaaattaattaaataaaaataaaaattatcctaagggaagagagatggggccctgatacagaagtgcacagccccagacaccctcaaagccagcatggtctctgtgaaagatgcaccctacagcagaattctgtgaagggttcctgtggggcagtgccccccggtggacaatgacctttagacaaaggcattacctgtaaatgatctagtgtgctagaaggaaaagacattcaatttccatccctagaaatccaggaaatgcaaactaagacaacaataagttgcctgtcaactttataaacaaaagaaggaaatagaaactttgttcaaaacaaactttgaatgcagtgtttcactttctgggcatgtctcaagacaaaagactttctttctctttttttttttctttcagacagtctcactctgtcacccagcctggagtgcagaggcacgatctcggctcactgcaacctctgcctccaagtgattctcctgcctcagcctcctgtgtagatgggcttataggcaaatgactttctttagaagaccagaattggctgggcatgatgactcacgcctgtaatctcaggactttgggaggccaaggcgggtggatcacctgagctcaggagttcgagaccagtctaggcaacatggcaaaatcccatctctactaaaaatacaaaaattagctgggcgtggtggcaggcacccataatcacagatactcaggaggctgacgcatgagaattgcttgagctcgggaggcagaagttgcagtgagttgagatcacaccagtgcactccagcctgggtgacagaatgagaccctgtctcaaaaaacaaaacaaaaaaacaaaaactacaccatggaatgaaaatggaaaaaatgtttcctggtacctcctaaggctaaacatatgtatctcctatggcccagcaatccacatctgggaatatacccaagaaaaatgattgcatgtctacgtacacgactgcttctagcaactctattcatagtagccgaaaatcagaaagagcccaaatgtccatcaacaatacatttgaataaataaacgtggtatagtcataaaatggaatgccacacagcaattttaaaaaataacagcacatggaccaacatgcaacagcatggtcaaatatcatgacataatattgagtgaaagaagctagacactgccagacgcagtggctcacgcctataatcccagcacttcaggaggccaaggcggatggatcacgtgaggttgggagttcgagaccagcctgatcaacatggagaaacccatctctactaaaaatacaaaattagccaggtgtggtggcgcatgcctgtaatcccagttacttgggaggctgaggcaggagaatcacttgaacctgggaggcggagtttgcggtaagccaaggtcgcgccattgcactccagcctgggcaacaagagcaaaactccgtctcaaaagaaaaaaaaaagaagaagaagctagacaccgccagatgcaatggctcacgcctgtaatctcagcactttgggaggccaaggtgggtggattacttgaggtcaggagttcaaaaccaccctggccaacatggtgaaacccgtctctactaaaaatgcaaaaattagccagacagggctgggcgcagtggctcacacctgcagtcccagcactttgggaggccgaggcaggcggataacgaggtcaggagatcaagaccaccctggccaacatggtgaagccccgcctctactaaaaatacaaaaattagctgggcgtggcagcgcgtgcctgtagtcccagctactcgggagggtgaggcaggagaatctcatgaacccgggaggcagaggttgcagtgagctgagatcgcgctactgcactccagcctggcggcagagtgagattctgtaaaaaaaaaaattgccgggcgtggtagtgcatgcctgtagtcccagttacttgggaggctgaggcaggagaatcacttgaacccaggaggcggaggttgcattgagctgagatcgcgccactgcactccaacctgggtgacagagtgaaactccgtctcaaaaaaataaaaaataaaaagaaatgaaaagaaaagcaaagaagctaagccgggtgtggtggctcacgtctgtaatcccagcattttgggaggccaaggcagatggatcacctgaggtcagaagttctagactagcctgaccaatatggtgaaaccccctttctactaaaaatacaaaaaaaattgctgggcatggtggtgtgcacctgtagtcccagctacttggaaggctgaggcaggagaattgcttgaacccaggaggtggaggttgcagtgagccaagatcgcaccactgcattccagcctgggcgacagagtaaggctccatcaaaaaaaaaaaaaaaagaaaggaaagagaaagagaaagaaagagagagagagacagaaagaaagaaagaaagaaaaagaaagaaagaaagaaagaaagaaagaaagaaagaaagaaagaaagaaagaaagaaagaaagaaagaaagaaagctggacaccaaaagaaaagaaagaagctagacataattgtatatgcattttatataagcattaggaacaggcaaacctaacttgtggtgacagaaatgagaaaatggtcacctctgcacgctattgggtgggagaatgcacaaaggaaccttctaatatgacgggaatgctctatatcctgacctaggtggtggttacaaagatatgtacataaattcattgagctttatacttcagttttatgctgtaagttatctccattttaaacgttaaatttttaaagtttgaaataaaacagaatagaatcaacaactagtgtatcagtactttcaagatacgcaaaggatcagaatgcaggaccagcctggtggagaatacactggggtggggagaacagggccccaggtgctcacattccctctccagccacaagggggctctccccacctcagctctctacagccaaatcctctggaaaacccagccgcacatgacctcgcctattcagaaatgtcactgctggctgggccaggtggctcacccctgtaatcccagcactttgggaggtcgaggtgggagactcacttgagtccaggagttcaagaccagtctgggcaacatagtgagaccccgtctctacaaaaaaatagaaagagaaatacaatctcatgattcaaatatacaaccattgcggaaaactgtcagtatttagcataaacatatgcataccttatgaccttgcccttcaggtcctggcctacatacccaacagaaatgcatacatatgttctccaaatgacctgtacaggaatgttcctagcagcactatttgtaattgccagagatcggcagcaacccaaatgccctcaacagttagaatgaataaataaatcacagtggaatgctatatacatcaatgagaatgaatgccatgcaacaacatggataattctcataaaggcaggcacagtgactcaacgcctataatcccagcactttgggaggccaaggtgggagaattgcttgaacccaggagttcaaaaccagcctgtgcaacaaagtgagacctcgtctctacaaaaaataaaataattagccagccactaattattgctgcatcaatggcacaatcataattggactactgcaacacagcagaaaagaccgcaggctccctagacagactgcctgggtgtgagtgcagccttggctggctgtgtggtcttagacaagctacttaacctctctgtgccccagcttccccatctttaaaatgagccagctgggcacagaggctgatgcctgtaatcccagcactttgggagaccaaggtgggcagatcatgaggtcgggagttcgagaccagcatgaccaacatggtgaaacctcatctctactaaaaatacaaaaattagccaggcatggtgatgcgcacccgtaatcccagctactcaggaggctgaggcaggagaatcacttgaacctgggatgtggaggttgcagtgagccgagatcacatcattgcactccagcctgggtgacagagcaagactctatctcaaaaaaaaaaaaaaaaaaaaaaaaaaaagcctaattatagcacctacctcatccagttattgtgaaaattaaatgaatgattatttgtagagcactgagaacagtggccatgtattccatgagtgttacatgactgttttactataccctggtattggacactgagatttttctaatcattttatatttcagacaatgctgcaacatacacccttataaacgtatcatttgccacaagtgtgagaagtggaatagtgggatagtgggattggtgaaccaaagagggtttgtgctggttacatgaagagatgtcaaatttgtctccattaaagttgtaccaatttacactcccaccacaatgaaggagagagctgatttctcaccattaccctggttgtggtgatggtttcacaggtgaatacatacatcaaagctcatcgctgtatacctcaaatatgtgcagcttttgcatatcaattacacctcaataaagctattttttttttttgagacagagtttcactctcgtcacccaggctggagtgcagtgtcatgatcttggctcactgcaacctctgcctcctgggttcacttgactctcctgcctcagcctcccgagtagctgggattataggtgcctgccaccacacccggctaatttttgtatttttagtagaaatggg[135 bp omitted]atggtctcccttttgagaaacacgtagtggagaaggatgataaatgattcaactgggatgcagccagcaaaatcccagatgttgcaaaccctatgagaaaaaggaccctatttattcagcaaacgtactgtaagagaagggagtgaggaagagggagaatccaaaaattaagacagaattaagatactgatccatgaaatgcaatgtgtagatctttgtttctctcatgagttgaataaaccaactgtgcaagaaatgttttatggcggggtgtggtggctcacacctgtaatcccagcactttgggaggccaaggagggagcacctcttgagcctgggagttggagacaagcctgggcagcacatgaagaccatctctaaaaaaagaaaaaaataagtaacccagacatggtggtgtacctgcagtcccagctacttggaaggctgaagcaagaggattgcttgagcccaggaggtcaataggctgcagtgaaccatgatcacaccactgcactccagcctggataacagagtgaggcactgtctcaaaaaaaaaaaaaaaaaaaaaaagaaggagtatttatgagaccccagtcaaatttaaggcactgaccagatagttaattatattaacaagttattaataacttttagatatgataatatattatggtcattttcttttaagagttcttataagatactaaagtttttgtctcctcattatgtagcagtgaaatgatatgtttggggttgatctcaaattaattggaaagatagatgaaataagaaaagctgggtggttagggaggatcacttgagctcaggagttcaaggctgccatgagctatgattgcactactccagcctgggcaacagaacaagatgaaagaaagaaaagaaaaagaaaaagggaagggaagggagaaagagagaaagagagacagataaagaaaaagaaggaaggaaggaaggaaggaaaagagagaaagagagaaaaagagaaagaaatggctgggtgccatggctcacacctgtaatcccagcacttcgggagaccaagttgggtggatcacttgaggtcaggagttcaagatcagccaagccaacatggtgaatcccggtctgtcctaaaaatgcaaaaattagccaggtgtggtggcgtgtacttacaatcccagctactcgaaggctgaggcatgagaatcgcttgaacccaggacaaggaggttgcagtgagccaagatcctgccactgctctcccgcctgggtgacagagtgagactctgtcaaacaaacaaataaacaaacaaacaaataaataaatctaaaaacgaagaagaagaaaagagaagaaagaaacactgctctgaatctcttcctgctcttctccctccacatacatacctgcctcgaggttggtggagctctgtgtggtctccttttaggggtaagcagggggcaatttgagaactgagatgcttcaagttattccccaggcagggtttgggttcccccagaaggatgttagcctgaaaattttaaaagacatggcacaggtcagggattcccagggttttgaccccaatggggacacacaacaccctgaaaggggaccaacttcttccttcacagagccctggaaacacatcttagctttctggaaacttcttaagattctctaagtccctccaggaaatttggaaaaattcgtcctcatcaaggccatgcttttggtgtatgtaggtttcagccactttggtggatctgtactgtctcgagtcaactaaacgggtgtgggcggaggattacctaggtgccgaggcaagagactgaaggcacaaactgtttcagtataataaaaaaaaatagttagaataagaatagtcgtaatacaaattagagatagagatggtcatggacaattatcaatcattattataaacatttatcattagcttttaatattactcttcgttgcattactaatataacctaggaataaccggcgggtatacggtcaggtgctgaagggacattgtcagaagtgacctagaaggcaagaggtgagccctctgtcacgcccgcataagggccgcttgaggactccttggtcaagcggtaacgccagtgtctgggaaggcacccattacttagcagacagcgaaagggagtctcctttccttggaggagtcagggaacactctgctccaccagcttcttatggaaggctggatattatccaggcctgcgcgcagtcatccgaaggcctaaacccctccctgtagtgctgtgcttcaatggtcatgctccttgtccactttcatgctcctcctgcactcctggctcctctttgaagttcgtagtagataagggtagaagaaatagtgaaagtcttaaagtctttgatctttcttataagtgcagagaagaaaacgctgacgtacgttgccttccctctctctgcttaggctacccaagagggaagggcccccgtcctatgatcacgtgacttgcttcaccttgtcaatcacttagaagattcaccctccttaccctgcccccttgtcttctacgcaataaatatcagcgagcccagccttttggggccgctgccggtgtccacgtcttgatggtagtggtcccctgggcccagctgttttctctttatctctttgtcttgtgtctttatttattacaatctctcgtctccgcacatggggagaacacccgctaagccccgtagggctggcccctacaaggcagccttcagaaaggccaatggggctgaggaactgaagccttctaccaacagcaggcacagcctgccagtcatgtgaaggagccatcttagaagcagatcctccagctccaattgagcttccagatgactacagcagccccggtccacgtcaatcgataaatcaataaatgcttattagggctgggcatggtgacccatgcctgtactcccagcactttgggaggcagaagcagcaggattgcttgaacccaggatttcaagaccaacctgggcagcatagtgagacccccaactctagaaaaaaattttaaaattagccaggcatggtggctcatgcctgtaatcccagcactttgggaggccaaggcaggagtattgcttgagcctaggagttcaagaccagtctgggtaacacggcgagaccccatttctatttttttaataaataaaataaaaataattttaaaaattagctgggcatggtggtgcatgcctatagtctcagctacttaggaggctgaggcaggaggatcacttgagcccagcaggtcaaggctgcagtgagccatgatggtaccagtgcactccagcctgggcgattaaccaacattccaaatgcatcctcaggaacaataaatctctcaaatattgcctctacaggggaaaaaacccaaaggtccttaatgatgactcagagggaaggttgaaagatgcttatcggagagtttgagttatatatccatctgtctatctatgtattggggttcaccaactgtaaaagcatcgttgctattacagatataaggcactccaagcccaagagccctgagggtagggaggttactccagaagatcaggaaccaggaaacgcccacacccacagtaacggtaagaatgacagctgcagaccagaccagccctctactgtgatgctggagagatgagacccagctgggatccctggctcaggccctcatgccaagacagctgtctctaatctgccggtgacagcccagccagcccattctactcagggaaatcatctggaatcatctgggtctggttatttttcacaagcagccaaaatcctgggaaactggtttgtacaaaccactaaatttccctggcttataaaatggcaataatcacagtctggcttcatagagctgtcatgacaattaagtggcttctgcaaatcacgtacatggaaccaggatggaatccaggtctatgaggcgcacacgagaaaagattttgaaatgagctccaaaggtcttgagatgcatgaaaccctcattatctgcacctttatttacaaatcaatgcttaacggagctaaaggcaaatcttcattttaagattaagaaagattaagattaattaagaaaacatagacatataatgaaaagatacatacatatatttaaaaaaacaaaaacaaaaactgataatgcagtgactaagagcaaataatgcaatgactaagagcaaataacatcaaatcattcacttctcatcaaccagcaaatgtgaatgccttcaaagcttcctgccaacttcctctagacaaccacacccaaatggcaaatgcagacacaacagcttctttgcttgactactctctcctacttcatttccgttctccccaccccctaccccgccccccccccccccgccgcctccaccccggcccccgccgccaaaaccctgtgcatcctgaacctgggagcgtcctttaaagaagccatacaagggagctccctgaggtcctcccctaaacggcctctgactctcctacctggaagcagagcccaagaactttgagctgatgagaggactctgggcttggccgtgtatgggaaagcagcctgttgcatgtcaagagtgacgccatcttgaagcaaaaccgccgtgattggttttgcagaccaacctgttgcagaccaacctggaatagctgacagctgagttccagacatatgagaaggtacagatgacccagaagaaccatccagccaagcctagctaaatgccctacccacaaactcagaagctaaaaaaacatgctactgagctttggggtggtttgttacacagcattattgtaactaaccaatacaagaaacctgcagctgctcagccaaatcctgaagctagcctgcttggatttgaaacccatctccattacctgtcagctgagtgacttaacttccctgagccttagatctctcatctataaaatgggataagagcaggtctaacccaacaagatggttccatcattcaggaaacaacagtttatggggttcctcttgctctgtgtgagaaagagacaacaatgaccaagacagactaggcatgatggctcacgcctgtaaccccagcactttgggaggccaaggtgggaggattgattgagcccaggaattgaaagccagcctgggtaacatagcaagaccccatctctaaaaaaaaaaaaaaaaaaaaaaattaagaacctgggaggccgaggttgcggtgagccgagatcgcgccaatgcactccagcctggaggcgagagcgaaactccatctcaaaaagaagaaaaaaaaaattaaaaattagccaggggtggtagctcatgcccatagttccagcactttgggaggtcaaggtgagaggatcacctaagcccaggagattgaggctgaagtgagctatgatcacaccactacattccagcctgggcaacagagcaataccctgtctgtaaaaaaccaaaacagtgaccaagagaaagttccatatgcataaaaagcaaacagatctacgatatgaagtcaggtagagagaagtaagtgctctgaagagaagcacaactgactaaaggacggaggctgtgatggggagaggagatactgctttcgataaggtagtcagggacgcccaccaaaaggagatgacatcccagccacgtgtgaatgaagagaccatgagggaggttttcccagcagagggaatggtggtgccaaggtgtagaagcgggcatgagattggtgtgtgtgagcaatggaaagaaggctggcaagaagaggcaagtggcagaatggcaggaggcggcatctaagaggcaggcacagatcagagtatggggataatggatttaggaagttttttgtttgtttatgtttttgtttagagacagagtcttgctctgtcacccaggttggagtgcagtggcgcgatcttggctcactgcaacctccatctcctgggttcaagtgattctcctgcctcagcctccagagtagctgggattacaggcatgcaccaccatgcccggctaattttttgtatttttagtagagacagggttttgccatattgcccaggctggtctcgaactcctgaacgcaagtactccacccacctcagcctcccaaagtgctgagattacaggcgtgagccaccgtgtccagccatttttttttttaaggcagggtcttgctctatcgcccaggctggagtatagtggcacaatcatggctcactgcagcctcaacctcctgggctcaagctattctcctgtcttagcctcccacgtagctgagactacaggcacaggccactcctagcttggagtgtggattttattgtgattaaattagttgtcaacctagataacaaacagcgagaggctct[132 bp omitted]tctactaaaaatacaaaaattagccaggcatcatggcaggtgcatgtaatcccagctgctagggaggccaaggcaggagaatcagttgaacccggggggtggaggttgcagtgagccaagttcatgccactgcactccagcatgggcgaaagagtgaaactacatctcaaaaaaaaaaaaaaagtttattcaagaacagagaattgcaatgggaataggagtgttatacatattcaaggaggtcaaagaagacaaaggtttttaaagaaaaaaaatgaggagaattacataatggttttgaaataatcatctttggctagaaaaatgaatcacaaagatgatgccagtctggggttggacaggcagttgctgggcaaacgtccttgcagaagtatttttctgtgtaagtttgcaatggtctttgtgtgagattgtgttttttgcagtttttttgtgatagtttttgtgatcagtcatacaagtatgagaaccctctctccatggctttccttcactctgttggtcggagcttttttttctttttcttttttttaacatgagtgactccattttgattctgataaccttcaaaagttcatatgtgcctgggtcatggggactgcttagtaaatgctagctttcactttactattggaatttttacctccaaaatgcagcatctccccattccaaggtcctaagtagaatggaagaggagatgccagggaatcttgacaagggaaactttcacggttgactctacatttgaatttctatagcaggattaagtctgtgtattatttacgtgatttaaaaaggccgagtgtggtggctcacgcctgtaattccaggactttgggaggctgaggcaggtggatcacctgaggtcaggaatttgagaccagcctggtcaacatataatgaaaccccatctctactacgaatataaaaattagccaggcatggtggcatacacctgtaatcccagctactcaggaggctgaggcaagagaattgtttgaacctggg[139 bp omitted]ggaaaactaaggcagaaggatcgcctaagcctaggaggtcaaggctgccatgagctgcgatcacaccactgcaccccaggctgggtgacagagcaagaccccctctcacaaaaaaatttttaaaaagataatgttaaatatatgttagtagataaatgttcacaaaaatcattagtgttgaaggaagtgaggaaaagattaaagggtgtattagtccattctcacactgctataaagatactacctgctataaagatactggccagacaaggtggctcatgcctgtaatccctactctttgggaggctgaggtgggtagatcacccgatgtcaggagttcaagaccagcctggctaacatgatgaaaacccgtctctactaaaaatacaaaaaaaaaaaaaaagtcaggcatggtggcaggcacctgtaatcagctactcaggaggctgaggcaggagaatcacttgaatccaggagacagaggttgtgagccgagatcgcactactgcactccagcctgggcaacaagagggaaactctgtctcaaaaaaaaagatactacctgagactgggtaatttataaacaaaagaggtttaattgacctgcagttccacattgctgaggaagcctcaggaaacttacactcatggcggaaggggaaggggaagcaagcaccttcttcacaaggtggcaggagagacagtgcaggggaaacggccacttataaaccatcagatctcatgagaactgcatgggggaaccacccccaagatcgaatcacctcccaccaggtccctccctccacatgtggggattacaatttgagatgaggttttggggggacacagagccaaaccatatcaccagggttaagatttataaattgctctgtgaaccccgaaaatctgagacaggtctcagttaattcagaaagttaattaggagaccaaggttgagaatgcacgcacatgacacagcctcaggaggtcctgatgacacgtgcccaaggtggtaggggcacagcttggttttataccttttaggaagacatgagacatcaatcagtaggtgtaagatgtacattggttcagtccagaaaggtgggacaactcaaggtgaaggcaggaaactggaagaaaggagggggcttccagatcataggtagataagagagaagtggttgcattcatttttttgaaatggagtctcactctgtaacccaggctggagtacagtggtgctatctcggctcactgcaacctccacctcctgggttcaagtgattctcctgcctcagtctcccaagtagctgggattccaggtgcccacgaccacacccagctaatttttgtatgttttagtagagcaagggtttcgccatgtcggccaggctggtcttgaactcctgacctcaggtgatccgccagtctcggcctcccaaagtgctgggataacaggcatgagccactgcgcccagccagttgcattctttttgttttttgttttttgttttttttttttttgagacagagtcttgctctgttgccctaggctggagcgtagtggcgcaaccttgtctcactgcagcctctgcctgctgggttcaagtgattcttctgcctcagcctccagagtaactgggattacaggcatgtgccaccatgcccggctaatttgttgttgttgttgctgttgctgctgctgttgttgttgttgagacggagtctcactctgtcatccaggctggagtgcaatcgtgagatcttggctcactgcaacctccgcctcccgggttcaagctattctcatgtctcagcctcccgagtaactgggattacaggcacccaccaccacgcctggctaatttttgcatttttagtagagacgggggtgtcgctatgttgaccaggctggtctcgaacccctgacctcaggtgaaccatccgcctcgaactcccaaagtgctaggatgacaagcataagccaccatgctggtagttgcattcttttcagtttctgattagcctctccaaatggggcaatgagatatgcatttatctcagtgagcagagcggtgactttgaatagaatgggaggcaggttcaccctaagctgttcccagcttgacttttccctttagctttggtgattttggggccccaatatttattttcctctcacagctcagaactgtgcttggtgccatgagtgtttgtcgcatagctgttggtaaatgcaggatgggcattgcaggcagaaggaacaggaagtgcaaaggttctgagaagggaatgggtctctgtggctaaggctcatccaggagacctgcgtggctgcagcggagcaggcagtggttagtgcaagaagttgcggccagcacagcggtcagggccagaccctgtgggcatgccaagggcacagtgcttccgctaaatgagaagagaagccactggagtgtttcaaaagttaaccattattggccaggcatggtgactcatgcctgtaatcccaatgctttggaaggccaaggtgggagaattgcttgagcccaggagttcaagaccaacctgggcaacaaagtgagaccccatctctacaagaaattagacaggtgtggtggcacacacctgtaatcccagctactctccaggctgaactgggaagatggcttgagcctgggaggtcaagactgcagtgagctatgatcacgccactgcactccaacctgggtgacagagtgaggccctctttcaagaaagaaaaaaactaataataatattgttcaatgaaatttaccagaggccactagtttggaccaagcttctgtgcaaagcccaacagaccaaaccaaaatggagtcactcgtgctaacttccacatcaccaagccaaaactcaattgttttacctgaccttccaaaaaatcaggagagtgaaagataacagccaagtccccaagcaggccagttttagcctgcatgataaggaaacccctgtcctttaacctttacaaggaaagtaattttgaaatggccaatacactttttcttctctgtttctgcagtctctgccctttctgtctataaaaccaacctcttttgctcgactcatcagaatactcattctgtctcttataattcgatgttgcccaattctaaaatcacaaataataaccagttaagatctttaagcaggctgggcacagtggctcatgcctgtaatcccagcactttgggaggccaaggcaggtggatcacttgaggtcagtagttcgagaccagcctggccaacatgtatcttttgtaaagacataaaaattagccaggcatgatggtgcatacttgtaatcccagctatttgggaggctgaggtgggagggaatctataagcaaatttgttgtgattttgtcttttgacagttcaaggactgaacactttctcttttttttttttttgagacagagtcttgctctgtcaccaggctggagtgcagtggggcaatcttggcttactgcaacctccacctcccgggttcaagcaattatcttgcctcagcctcccgaggggctgggattacaggcacctgccaccacgcctggctaatttttgtatttttattagaggtggggtttcaccatgttggccatgctggtctcgaaatcctgacctcatgatctgcctgcctcagcctcccaaagtgctgggattacagtcatgagccaacacgcctggccggactaagcactttcacctttattcttttctgtctccaaactcatccacaatctcacccagcttggactcacccctggcagttcatctccaccctgaccttgctttagcaatgatctttcatttcattcatcccttcttttggggcctttccatgactctagactctgagggtatacaatagtgagcaatgcagactcagatcctgcccagaacattccctaacacacagtaggtgttcattaaaagcttttagaatgaataagaatagttgtttttttaagaccctactaacaaaataaaaagttgacatccttaatgcttgaccctccaattttgtctttgaagcttgatggttcacaatctccaaactggtttacagcacaaagtcccaatgccaaggttctttcccaaatgggcctgacctaattccccagcctcatctccctgctctctcccaggttgctgcacccagttccggacacaaggcatgttcgctcaggcctctgcacgtgctccttgttatttaagatcccgctcctggtcttatccatcacgacctctgagaagatgtcctggaaacccagacagagctttgtccctgtgtctgctgcagatttaggtgaatgttggtgcaagtgcattcgccaaatagcagtagtactttccgagagtccagccaggggctggatgctgatgcttagctgacattgctgctccaagccgccagagggcgcatggaaaacaccaatctgacttgcagggtgaaaaccctacaggagctcccagtttctcgtataattaacagttaaggtgccactgttcttgttttgtttgtttgttttgaggcagggtcttgctctgtcacccaggctggagtgcggtggcgcaatctcggctctctgcagcctcgtcatcctgggctcaagtgaacctcccaccttttgacacagaaaagttggcttatcagtggttcattttgttaacccatgttcatgagtttcttgtgatgtgctaatttactgctgatatttaggatagtcctgttgatcctaataaattcctaattgttgttcttgtttcatcggttcaccgtgaaccagtggatgttgtctcactcttatccctgatgcacactggcacttttatatgaagtgcccttgatgacactagtgatgatggttgtcactagagtggtacttgcattctggattatcttactgcactttagcttgctaggtgagcactcaaactccctagtagctgagaccacaggtgcgtaccactcagctaatttttgtattttagcagagatggggtctcgctatattgcccaagctgggcagactcatgggctcaagtgatcctcccatctcagcctcgcatagtgctgggattacaggcatgagccaccgcgccccaccaagatgccactgttttttgtttgtttttctggggcttggggggcttttttgttttgtttttttgttgtggggggagttcgagacagagtatcactctgttgcccaggcaggagtgcagcggcatggtctcggctcactgcaacctccgcctcctgggttcaagcgattctcctgcctcagcctcttgagtagctgggattagtcaggcccgccaccaggcctgactaattttttttgtatttttagtagagatgggttttcaccat[140 bp omitted]aggtgggacttgggtatgggaccaaattgaggactagctaagcagtttcccataatacacgcccaccagtatgccacgtcagtttaccgttgccatggcaacacctgggagttactgcccctttccatgccaataaccccacaagccaaaagtcattaccccttccctagaaatttctgcataaaccgcgccttaatctacatgtaattaaaagtaagtatcgggctgagcacactggctcacgcctgtaatcccagcattttgggaggccaaagctggcggatcatctgagtgaagagtttgagactagcttggccgacattgtgaaaccccatctctactaacaatacaataattagccaggcgtggtgacgcccgcctgtaatcccagctactcaggaggctgaagtaggagaattacttgaacccaggaggcggaggttgcagtgagccgagatggcgccactgacagcactccagcctgggtgatagagagagactgttgtctaaaaaaaaaaaaaaaaaaaaaaaaaaaaaggagtctatttacaagggtggaggcagtgggtagaaagatacaggcagcccaaggcaaccgtacatcaagaagggagttggggaaataaatacccaccctccagtttcttgccagtgtctccccattgggcaaaccgatgcagaaagctagaggttcagaaagctcattgtggttcatgctgatcccaaggtatggtcagactcccaggagtatggcggggagaggtggagagtggacctgaagaggcaaacaaaaaatatccagcatagtccgggcacagcagctcacacctgtaattccagcactttgggaagctgaggtgtgaagatcacttgaggccaagagttcgagaccagcctggacaacataatgagactcatctctacaaaaaaaaaatttttttttaattagcctggcatggtggcatgcacctgtaattccagttatttccaaggctgaggagggaggatggcttgagcctaggagtttgaggctgcagtgagctatgattgtaccactgcactacagcctgggcaacagagtgagaccctgtctcaaaaaaaaaagggaagaaaagaaaaaagaaaaacatccagcatagtgttctatttgtattgttattgtatttcttattgtggcctatgaggcccttcaaggtttaggcctaacctctgcctcctcttcccaccccacccactacattcctctctgaaacccagggactgactgggaagggatgggagacaaccttctggagtgatggtgatgttctgattcaagataaggattttggcggcacgggcctgcacatttgtcagaattcctctaacaatgtgcttaagttttgtgcatttcagcatatgtaaattttacctgaagaggagaaactaaataaatatgcttttcaacttactttgaaatgcattgaaaaggcaagaaggagtgatggatagatggatggaaaggtgggtaaatacttgataaagcaagttgagtaagatgttaattaatttagaatctaggtgatggggccaggcacggtggctcatgcctgtaatcccagcactttgggaggccaaggcaggcagatggcttgagtacaggagttcgagaccagcctgggcaacagggcgaaatcctatctatctctacaaaaaaaaaattagccaggcgtggtggcacatgcccctagtcccaactactcaggaggctgaggtgggaggatcacctgagccacagaagtcgaggctgaagtgagccaagattgcaccactacactccaggctgggctatgggagtgagaccctgtgtccaaagataaaataaaaatagagctgggcacggtggctcacccctgtaatcccagcattttgggaggccaaggcggatgaatcacttgaggccaggagttcaagaccagcctgcccaacatggtgaaaccccatctctactaaaaatacaaaaattagccaggcgtggtggtgggcacctgtaatcccagctactcaggaggctgaggcaggagaatcgcttgaacctgggaggtgaaggttgcagtgagcccagatcacaccactgcactccagcctgggtgacaaagtgagactctgtctcaaaaataataataataatcatacaaatagaatctaggtgatgggtatatatgagtgttcactgtaagattattttaacttctctatgttttaaataattcattttaaacatctgtgcaaaagtaaaaataaaaatttgggaaagtgttgagtcagcaaaggaatttggattggattgattggttggaggaaccaagaagaaatgaattgctctgggactttccacagaaaccacaaccgcttccctgcagcatagagctggcctccaggaacaaactgtgccagctctcaagtctcagttctccagaaagcctgtcaggaaaaaagtgcagagaagagaaagagacagcacccttgcttctcagaaatcctgtgatgaacagatctgcctaacatctgaagtcatgcactattcattcgacaaactataattgaaaccctcctctgtgcccagccctgagatgtgtgtgtggcactgacaacatagccccagcccttccctcaggagactcaaagtccaggggcagagacagacacatcttccagtgttatggtttggctccatgtccccacccaaatctcatctcaaattgtaatccccatgtgtgagggaatgacctggtgggaggtgattggatcatggggacggtttctcacatgctgtttttgtgctgatgag[224 bp omitted]gaggc[169 bp omitted]tttctctgctgccgccatgtaagacatgccttacttcccattgaccttctgccataattgtaagtttcctgagtcctcctcagccatgcagaattgtgagtcaattaaacctcttttcagtccaggcgcagtggctcaaacctgtactcccagcactttgggaggccaaagcaggcagatcatctgaggtcaggagttcaagaccatcctggccaacatggtgaaaccccatctctcctgaaaatgcaaaaattagccaggtatggtggcggacacctgtaacctcagctacttgggaggctgaggcaggagaattgcttgaacccgggaggtggaggttacactgagccaacttctctctactgcactctagcctggacaacagagtaagaccttatattaaaaaaaataataataaataaaggccaggcatgatggctcatgtctgtaatcccagcattttgggaggccgagccaggcagatcatgaggtcaggagttcaagatcagcctgaccaacatggtgaaaccctgtctctactaaaaaatacagaaattagctgggcatggtggcacacgcctgtaatcccagctactcaggaggctgaggcaggagaatcacttgaatccgggaggcggaggtttcaatgagccgagattgtgccactgcactccagcctgggcaacagagcaagactgtgtctcaaaaaaaataataaattaaaaaaataaaaacctcttttctttatcaattacccagcctcaggtagaatctttatagcaatgtgagaccagaccaatacatccagatagcaacaatcccaagtgatcaaaacaataatgggggaagccccaaatgaggcatgtgacccagactggtggtcaggaaagatacctgatggagaggacatccaagctaagtcttaaagaaagagtaggtgtcaccaggtagagacggaaggacaatggaaaagcattccaggcagaaggaacagcaactgcaaaggtctgggagtgagcagaagagtttgatgctcaaacttttctgaactgaacttttctgaactgaaaagttcagtgtcattggaatgtgaaaggaagcagagggtagggaggggttaaaggcaagcatgcagcagtcaccagttcctgtgtgggcttgtaagccatggtagggcattggaatcttaccctgcgagtgctggggagtcacaacagggttatagtcagtaggaggacttcaccagtttgtaaatgattccaattgcaaaacaagggaaggagatgagggaatgtatcggtcaggattggctaagttatgctgcagtgacaaacagctccagaattcagtgactcaaaacaacaaaggttggctgggtgcagtggcttacgtctggaatcccagaactttcagaggccaaggagggagaagtgcttgaggccaggagttcaagaccagcctgagcaacatagtgagattccatctcttcaaaaaaaacttttaaaaattacctgggcacggtgtgcacacctgtagtcccatctactcagaagcctgagacaggaggatctcttgagcccaggagttcaaggttaccatgagccgtgatcgcaccactgcactccagcctgggtgacaaagcaagaacccatctcaaaagaaaaataaataaattttaaaaataaattttctggccaggcacggtggtgcatgattgtaatcccagcactttgaaaggccgaggtgggagaatcttttgagctcggaagctcgagaccagcctgggtaacatggcaaaaccccatctctacaaaaaaaaatacaaaaattagccaggtatggtggaacatgcctgtagtcccagctactcaggaggctggggtgggaggattgcttgagcccaggaggtggaggctgcagtgagctgtgatcgtaccagtgtactccagcctgggtgacagaacgagaacatgtctcaaaaaaaaattttttttctagcaaccacattttttaatttagttatttttgagacggagtctcgctcttgtcacccaggctggagtgcaatggtgcaatcttgactcattgcaatctctgcctcccaggttcaagcaattctcctgcctcagccttccaagtagctgggattacaggtgcacaccaccgcgcctggctaatttttgtattttagtagagaccgggtttcaccatgttgggcaggctggtctcgaactcctgacctcaagtgatccaactgcctcagcctcccaaagtgctgggattacaggtgtgagccaccacacccagccattgccattttatagatgagaaaactgaggcacagaaagatgatggggcttgtccaaagtcacgagctagagcaggagcagggatttgaaccccagccatcgggctccttgcaaggagagcagagatgggttcctacatggtcattccttgggctgggtgagtgtgagcccttggtggtccaatcctactccccccagaggtctcagtaaagagagaatgctagtgattcttgagaatactgaagggaaaacccacagttggtcccaagaacgacggtgtgggtggaagtgaagagatgtgggaaaagattttcctctttcttgccccagattgccagggagttggaaaaatccccttgcactatgggctatagactagtggctgtcactgctactggattcttcatcactggaaaagcagaaagttggggtgagttccctgtgaagtcccagaccaggagaatggatgtaggaggagggcctctctttgttcttgttttttgtttgtttggtttggtttggtttttgtggggttttttgttttgttttgtttctgagacaaggtcttgctctgtcacccaggctggagtgcaatgtcatgatcagagctcactgcagcctcaacctcccggggatcaagcgatcctcccaccccagcctcctgagtagctgggattacaggcgcgtgccaccacacgcctggctaacttttgtactttttttagagacgaggtttcaccatgttgtccagactggtctagaactcctgggctcaagctatcctcccacctcggcctcccaaagtgctagaattacaggtgtgagccaccgtgcccggccaggagagcctctcttcaacaagcatctccagtgtgccaggctctggaaggagaactctagtctctcattttatgaccctccctttccaaatggggaaactgaggctcagaggagacatgtgactcatccaacatcacacagaggggaaggatggaaaagtttcctcccacccccatcccatggccacccaattccctttccagaggcaatggtatttattgccttgtgggtatttcttgacatgttctaggcatatacaagcatttacacacagatttttttttttacacaatagtggtacactgttctgtatcttatctttcattttacttaacattattttcaagatctttccacattaatacaaatagatgtgcctggttttatttattttatttaattaatttatttttgagacagagtctcactctgtcacctaggctagagtgcagtggcgtgatcttggctcactgcaacctccacctcctgggttcaagcaattctcctgccttgcctcccaagtagctgggattacaggcacccaccaccacgcccagctactttttgtatttttagtaga[141 bp omitted]catcaaactgtgtgagcacaccatcataagcataaccagttccctcctgataaacatttaggttattcctaatgttttgttattccaaacactactgcaattaacatcctggagcagacctgacatcagcctcaggcgtccatgtctacatgtgagataaattcctgagagaaaaacctgccaagtcagaagcgatctgcatttgtcatttagaaagacgtttccaaattgcaccccaatttccctcccctgcaactgattgaccaaccatttctcaaaagggctttttgagcactctctctctctctctctcttgctgtctctgtatttttttaatgtttgacagcaagaagatagtcatgtcttgcttatgtaattaaaattaaacaagcccttcgttaaaaacacacaaacccaggaagaagagaaaccagcaaggccagttcaggcagatccaccctgccccttgtcacacctgccttgtccccagcaagccctgaaaaagaggctgaaatcaatttctcacacatggacctcagacatcaaaccttggaaaaaatacaggaaagagattttgtaactttccccctctgtggcttttcgtacggctaaaccctctcactctctcttccctttctttctcctcgtcctttttcttctttctctcacttctgttttggtgagctgtcattaaaaacactttaaagccgtgtccagtctaataagttatacagaatctggctgtgtgtgtgtgtgtgtgtgtgtgtgtgtgtgtgtgtgtctgtgtgtgagagagagagaaagagagagagacagagtctcactctgtcgcccaggctggagtgcagtggtacaatcacagctcactgcagcctccgccttccgggttcaagtgattctcctgcctc[131 bp omitted]gctccgcctcccaggttcaaacgattcttctgcctcagcctcctgagtagctgggactacaggagtccgccaccacgtccagctaatttttgtatttttagtagagacagggttttaccatat[136 bp omitted]ttggccagactggtctcgaactcctcacctaaggtgatccgcccgcctcgacttcccaaagtgctgtgattacaggcgtgagccaccatgcccagccgattttgttgcatttttagtagagatggggtttcgccatattggccagactggtctcaaactcctgacttcaagagatccacccgcctcggcctcacaaaatgttgcgattatgggtatgagccaccacacctggccagaatctggtatttttaacagaaagcagagctaggagcttaaaagtagaaactagatgagcaaaacaattgattatatttgaaacacattaagctcttcttttctcttctcctcctgaacacaagcaagtaactgtctggaaggaggttggaggggttgcggtgggggagcgggagtctcagggcccataatgggtttcagaggccaagatggataaggaggtcatcctcccaagaagatgggaaggctggacagtgacagctgcaaaagattggttactttcagggggatggatccgctaagtaaatatattgccagcctggccaacatagcgaattcccatctctactaaaaatacaaaaattagccgggcgtggtggtgtgcacctgtagtcccagctactcgagaggctgaggcaggagaattgcttgaacctgggaggcagaagttgcagtgagccaagatcacgccactgcactccagcctgggcaacagagtgagactccatctcaaacaacaacaaaaaaaagcattggaagccagatttcttttttttgagacagtgtcttgctttgtcacccaggctggagtgcagtggcaccatcatggttcactgcaacctcggcctccagggttcaagcgatcctcccacctcagcatccccaagtagctgggactacaggcacgtgccaccacacctggctaatttttaatgtatttttcttagagacgaggttgcccaggatggtcttaaattcctggactcaagggatccgcctgcctcagcctcccaaaatgctgggattacaagcatgagccaccacgcccagctgagtggtagggattttgagctggggtgaatggcgattgtaggtcatttgcatttttaatcggctttacccagaagagaaggcaactttcttctgtcttcatgacaggaggtattttacaactgagagctgagtcatgtaccaaagttaggctctcaccttcctggggggagataggagtgctatttccttttatgtttacaatttcaaaaagatagtttcctgggtcctggtcactcatccctgtaatcccagcattttgagaagccaaggcaggaagatagcttgaccccagttcaagatcagcctgggcaacatagtgagactccatttcctgggctatcaactggcaagatactttttttttctttttttttttgtgacagagtgtcattttgtcgcccccaggctgaagtgcaatggcgtgatcttggctcgctgcaacctccgcctcccaggttgaagcgattctcatgcctcagcctcctgagtagctgggattacaggcacttgccaccacacctggctaatttctgtatttttagtagagacggggtttcaacatgttggtcaggctggtcttgaactcctgacctcgtgatccacccgccttggcctcccaaagtactgggattacgggcgtgagccaccgcgcccggccaagacttttaaagaggtttatatccatctcaaatggacaaagaaataatttacaatgacaagttttctcaagtaaatgctctaagaaaagggaggtaaggggcctctgtggttagaccctctggattctgagggcctagaggcaggaggaagcctgtctaaagtttagtcaagctgagggaaacattatggcagtgttggtacactctgtaaagctgacctgcccgtgttcaaatccgagctccactgcttaatagctgagtgacgtggggcaagtttcttaacctctctagccctgatttccccatcttgtaaaatgcaggtgattaacacttacttcataggatggttttgtagattaaatatattaatccaagtacagcacttaatacagtacctggcacataatcaatgtattatttgctgtgggtaattacttcatcattctgagcctcagtttccccaatcatcccatctgaaaatatgtggaaaagtcaatgagatgatggctgtaaactgatagcatagacttggcatctagtaagactgtctttaatcactaacacagctgggcacggtgcctcacatctgtaatcccagcacttgagagacagaggcaggaggatcatctgagcccaggagttcgagaccagcctgggtaacatagtgagacgccaatctctacaa[133 bp omitted]atggagaaaccccatctctactaaaaatataaaattagccaagcatggtggcacatgcctgtaatcccagctactcgggaggctgaggcaggagaatcgcttgaacctgggaggggaggttgtggcgagctgagattgtgccattgcactccagcctgggtaacaagagcaaaactccatttcaaaaaaaaaaaaaaagaaaaatcattaatactcccaacactacatttaccatcactgatgtttccctctatacatgtattgcaatatatgtgtttcagaataagagctcatactcttattgatgttctattttgttgctattctccttatttgctattgttttgttgttacctcacactactccccattatcaatagtaatattggctatcaatagcaatattggcaatatactgttatgatctcactattccccacatctgatcctcctcccatcaagcagtcgcaaagcctaccaggaactctctcattcccaaaccaggcttttcccctccagtgcctctagggccaggccttcatctgattggaaggagatggaggtggggctcaagccccaggtccccaacatcaagcaaagaccaacagcagcacccccgggtcctacagacaagtgggacacagtaggtaagcccagttaatgacttttttttttgagacggagtttcactctttgcccacgctggagtgcagtggcgtgatctcggctcaccgcaacctccacctcttgggttcaagcgattctcccgcctcagcctcccgagtagctgggattacaggcatgtgccaccatgcccagctaattttgtatttttagtagagacagggtttctccatgttggtcaggctggtctcggactccagacctcaggtgatccagctgcctctgcctcccaaagtgctggcattacaggcatgagccactgcacccaggcttaatgactcttagtaaaccagatgaagccgggtgcagtggctcctgcctgtaatcccaacactttgggagtccaaggcaggaggactgggcatcatagcaagacctcatctctacaaaaaataaaattagccaagtatgatgggataagcctgtagtcccagctacttgggagcctgaggcaggagttagaggttgcagtgagctatgattgggccactgcagtccagtttgggtgaacagagaccccgtctctaaaacaatgcagacggctggctggatgacaaggcgggtggagcctagggagggtacataaactcattagacaaagctctctattccctggcattgctaaaagccccattcgcccctccatgctgcttaatggtttcgcccggtctccccctcaccagtgggaccacccacatgcaggatagacccaggagattaaagttcaaccgtgacttcccccaggactgcggctctaggtcccatatctctcccgttaaaggctttatgatgcccaccctagctcagctagagcggttattgcgagaaacaaggtggaagtgactcctttaaagcactatacaaagtaattaaatctttattgaggcatttatgtgccagaaactgatcacacacagacataaggcacggtccctgccctcgaggagctcacagtctagtaaggaagacatatggggaaccgattccccaaagatgcggggagtaggggaggcagtgcttagagtggggagccattgtcccacccaccccacgctccaaagtccaggctggctaggagaaagtgagtaggaagcttagcatcctctctctcaccttccccgtgacagctgacttctctcactctgtcctaacatcacaagaggacaagcggagagacaaggatgagaaggatacaggagctgtcctcaaaaagctagaacacccctggcagaatatatacaacggtattttatttcccaaagccgcaaaccagcgcagcagaagctggggatactggggaatgttggaaaaacaggggctgggccagcccagtccagtggtgggaacaggaagtgatgagaagaggggtacccagggccagagaagtaggtgagagggaaatttccaggtggagaagctcacagtaggacaccagcagccacggccaacagaagggctgccaatccagctgtgggagccacacagcctttattatggggctgctggggccccccttttgcaggatactgccctgaattgctgcggtcctggtggccagcggcgcctccagtcaacctgggctcctcatcccgggaggcctcgtgttctactccctgtctcggagtctgactggttggcgctggcatgggtttggtggtggatgtgggtctcactggggccgaggtagaagtggtgacagatgtggttgaggccacagtcgtgggctctggagggggcagccggacaaggggtgggattcgaggggagaagtaggtcttgttgcggaggtcagagttacagcgggacccctggcaacaggagccactgagcgtgaaccctgggcctgttactccatcccgagtgcagaattcatcctggacacagccccggacaggcaaggacacagtcacattagctgcaggaaggagacacagataggtcagtggctggagggagagaggttgacatggcc[134 bp omitted]aaaaaaaaaagaacagagaacccccaaaatgagacagaaagtctctgcatccattaatcccaaaatctcaactcaggtcctactatgagaaacagacagactcactgtctttggcacatggtggattaacattttccattgtgctttgaatggaaatgtgtgtaggctgaaccaaaagtagggtttaaaacaaaggcttagactgagatacaagacctctcacaagaccacagtgcagaacaaacttcctctacaaccctctcaccattatccccttagccttcaccctggcttttacctccccatcagaatttactcttagagtcagagttacatctccacaccaggctcagtggttcacggctgtaatcccagcactctgggagacctaggcagggggatctcttagcccaagagttcaataccagcctgggtaacatggcaagaccccactgttaccaaaaataaaaggaaccagtcgtggcggtgcaccctgtagtcccagctacttgggaggctgaggcgggaggactgcttgagcccaagaggtagaggctgcagtgagctatgattgcgccactacactccaggctaggcgatagagcaagatgctgtctttaaaaaaaaatagtaataataaaataaaaaagaactacatcttccatagcataactggcaggggatgggatttgaagaacttcattttccatggttacatttctcaatagtctgggacaggcgggggaccccttgagttttaagggctaagaactagagattccccgcagtgcctgggcagaagcttagaggcttaaatacctcttaagtacctggcagccctctatggaaatgcatttccctccaaaacactctgggacaaagcatcactatccccacactattaatatgttgggggaagggactgcattttccatgatgccctacgatacaagcacctaggccccacgattcccagaatgcgtcgcaggttaaggaaacgctttgggtaaagggctccctaccgcccagggtgcttcagaagggctaccacaactcccgtaggtcccgtgctccggggctccctcacctgccgtcaaggtgacgttgccgtcgaagcagcccttgtagacatgatcgctggcgttgtagcagctcacgaccggcggcgatgtaccctggcacgcctcccggctcaggcccacacagctgtagcactccacgccgttgggcgggtatgcactctcattacctgcgaggggagccgagaggaagaaaaggtgtcgaaagggttcgggaaccgcagctcgtcctctagccccgcccctaaggcctggccccggcactatcgatgaccccgcctactagtagccccgccccagcgcgcaacctcgcggcgcctacagccagaaagtccctcctgctgcctcttggccccgccccagagtgtgaccccacccccagcccaggtcgagtactcccgcctctgccacggctccacctctatcttggcaggcccgaatgtggctccgcccccgcagctacggcccggcccccacggacctgccgggtcgagcgcccgcgaggtgaggttgagcttggcgttgcagcgatcctgagcgcattgctgcagctggatgaacgccagaagcccgtgaagatccaggccgcggtcattcttgccggggagtcccgaaccgcaaccccgcactgccagcgagaattgtccgtggactagggagagggacaagggcgggattagctgtgggcgtggtctcagatggggcgtggcccagagttgggtagggtctgggaggggcggggcctcaaataggccaacaccacaggaccgacaggcaggaattggcggatggacgcccccaaagagccgctcagagcggaaagaacgaccgaagcagggaggagcggggtcacggaacgggggcggaacctcaaagagctgagtcggaggagacagcctggttgacaggcagggatggggaggtctcattggtggagcagaaaaagtgcataggacgtgacctcgttccaaacccgagctctccccgtccgccccacccagttctcaactctctgctcctcgcgcttgtaattgttaatagagaaggcctggcctgcaaggctgtgtcgtagggtcccggccaggctgaaagggaggggtggggccgcgttaaaggggcgtggccagatccagaaaggactataaggaggcggggctgggccggaggagcctgcagtggtgtgcgtggcccgggggtccccactcactggtctccaccgcccccacggcctcggtgcagacgtccacgcccggcgcgcacttcactgtcttcatcttgttcggggagcatccgtcatctgctttctgcacgcagctgtagcactccagggcctgcgctcctgggggagcggagccgaatagacctgagccctccttgctaaagcgtccacccccaaggagaaatagtccttcccatgccctctgtcccgggattagacagtcttattgcacacacttttccagggcaggagtagggaaaagctttccacaaatctggaagcacgggaatcactggacccttttccttcacacccactatgccaactgtgggcacatccttccgacagccctgtatgcccactgtaggcgatccccgccatgaagcccctcatcccggggtaggaaggatacctcctcacggttttctgctcagaatgagagaacttttcccacagtgtgtgggagaacttttcccacagtagactgtgctcagtgagggatcccttcccacagcccccttctgctcaaatgagagaacactacccacagcttctctgcccaggacagggaacacttttttctttttttctttttttcttttttttttttttgagacggagtctcgctctgtcgccaggctggagtgcagtggcgcaatctcggctcactgcaacctcccctcctggattcaaacgattctcctgcctcagcctcccgagtagctgggactacaggctcgcgctaccgcgcccagctaatttttgtatttttagtagagacagggtttcaccatgttggccaggctggtctcgatcgtttgacctcatgatccgcctgcctcggcctcccaaagtgctgagattacaggcatgaaccaccgcgcccggcctaggaacaggggacttctttctgcagcttcaggataggaaaattttgcccacagctccccttgtccgtggtggggaacccttcctacggcccatggtggaggacccttccctctgcctcccttgcttaggatgggggaactttgcccacagtgccctctgcttatgtggggatccttcccacagccttctctgtacggggccagaggagcctcctccctaagagcccccactctaccccctccacctctccgggcagcagacccacctccgcgaagcagcagcagcagcagccagcctgcagtccagatcatggcctgggcacctgctttcctggcggggtccatggctccgtcctgctcccttggcgtcccccctggatgtgccgcctccgagctcgggccctcttacctgagcccaggatgagtaacctcgccccaggcaaccccagccttgcccaaccgggccaactcagcgtcggctgtggggcggggccccgcccctaggcgcgtcatccaagggagagcggtccctgccctgtgaagttgccaaggagggaaagggtgggagctgaggttccctgacagctcgcgggagaaagtctgtgtgtgtttggagtgggagagtagtggggcttaaagacaggctggggctactcgacattcagtgttcggtaactgttaaatgagcatctacagtgtgcccggctttggtctaggtaatgctggagatgaagacagaaccagtgcctgtcctggcagagctcacagtctgatgggggagacagatgctaatcaaataatcgtacaaattggtgtttaccaaagagactaagacactgaaggaaaaagtgtagtgatacaaggagatgtgcagtctagaagtgggggctggtcggtgagggcttccttgaggttatctgagatgcaacctcaagggcatgcaggatgtagccagctagagcaggtcaagagagggacacagccctttacaagcagagggaacagcacgtgggagcacctggaggtaggaggtaggatggaccattcaaacatggaaaggagagcagtgctcctgagctcagaagtccatgagagaagggcaggaactgagatgaaagagtcaggcagaggccgagacactcagggcatcagaggccccgacaagagatttggattaattttgagaatagtagagaacctttaagagggtctaaatgagctggaggacataatagatttgcttcctaatatgatcaacctgagaaatagtgcagctagccatcaagaagtaaatggaggccgggcgcggtggctcatgcctgtaatcccagcaatttgggaggccgagctgggtggatcacttgagatcaggagtttgagaccagcctgggcaacatggcgaaacctcatctctattaaaaaaaaataataaatttaaaaaaattagccaggtgcagtggcgtgcacctgctgtcccagctactcggaagggtagggcaggagaatcacttgagcccaggaggtggaggttgcagtgagctgagatcacgccactgcactccagcctgggcaacagagtgagaccctgtctcaaaaaaaaaaatttaaaaatttaaaaattaaaaaaaagtaaatggatctgagagtaggatatatgattttaaaaaaggaaaaagaaaaagaagtgaatggcaaaagagagtggttggttcggccaatggaatactacacagcaatagaaaagatccaacacctgatatatgcagcaacatatctcaaaaactttgtgttggggccaggcacagtggctcacacctgtaatcccagcactttgagacaccaaggtgggaggatcacttgaacccaggggttttgagaccaggctgtgcaacatagtgagatcccatctcattttattttaaaaaaagaaaaaacttggtgttgagtttagaaagccttaaacaaacaaacaaaacatactgtgtaactgaatatatatgaagtttcagaacagacaaaactaaccagtggtgatagaaatcagaacacatgttacctttgggagggcatggccccagaaggagcaacagggaggagcccccacgatcttcatctaggtgacagctgcatgtgtgtacagatacgttgagaatcactgactcaggcctgtcactggacgtatgttattcttcaataaaaacaaggtaaagaatgtcactgtggactctgtgtaaaaaaggaaaatgactctagaaggggtgagagagaaggccaggaaaccaacagggggccgtgtagttttccatggaagaaagagaaaaacagcccctaacagctgggagttggcctgacacacatagtgaggccatggagttcaactgcgcctagataatttcacagagcaccaacctggacaaggccacactgcgacagtaaaggatcaagaaacaaatcaatagcctgggcaacacagcgaaacctcgtctctactgaaaatacaaaaaattagctgggcgtgggggtgtgcacctataatcccagctacttgagaggctgagctgggagaatcacccgagcctgggaggttgaggctgcagtgagctgagattgcgacactgcactccagcttgggcaaccagagtgagaccctgtctcaaaaaaacaaaaaacaaagaaaaacaaaatcaagaccaatccatagccatgtctgaacacagaaacaaacaaggtcattgtgcaaaccgcagaatgactaagcatccccatatcctggctaatataaatgactgcttatattatattaaagttacaactttaacctcactttatttctcctgcctcataaatgagatttatgcaaatgcccaaccacagcattactcctcctctgtttaacagtatccaaactagaacgaggtcccacttccttgcaccattcccaagaccaccacacacaagcccaaatcttaaaatcaatcctttctggccaggtgctcacacctgtaatcccagcactttgggaggccaagggggtggatcacctgagctcaagagttcgagaccagactggccaatgtggtgaaactccgtctctactaaaaatacaaaaaattagctgggtgtggtggcacacacctgtaatcccagttcctggggagtaggggctgaggcaggagaatcgctgaacctaggaggcagaggttgcagtgagccgagatttgcgccactgccctccaacctgggtgacagagcaagactttgactcaaaaaaaaaaaaaatcaatcctttctaacacccttttacttagacacctcacagttacctcatggtgtgttttctccctcattgcaagaagcaataaacccaacttgttcaaccacaggtgtgtccctggtggagaacattgacacaggccagagcagatgtacttagccaagggtgtcccaaaggaaaggtgaagagtggaaagatctaaaatattttaggaggaagaacaggtagggattactgatggatccaatgtgagggaagaggaagtgggaggtttccaagctaattccagacagttcttgccataaaccacatcatgacattaataacaatggtaacaaaagtcataataacaacagtgactgagtatcaagtgtttgtttcccagaaactgttttgaacagggggcatgcattatctcatttaatcctcacctgtaagtatggttattagcatttattaaccacttactctgtgcttagcactttctgtgaatcctctctgaatgtcacgacagctctgcaaagagagaactaagtctcatttcacagatgggaaaactgagactgggagaggcttggaagtggcagaactgggatttgaatccagggctgtctccaaaggcccccatgccatttgccaaagtcagagcctggctttaggcctgagattatattttgcaatgacccttagttttacagccagacaggcatgcatttgaataccaactctgcccctaatctgctgtgtgacttgatcaagtgactccaattctttgatgttcagaggcttcctgtctaaacaaagactatgacaaaagcacatgcattcagtgcttcctctgtgccaggcaactttccacaccctttacacacaatcctatgagagatttctatgatggtcaatttacaaatggggaaatcgaggcaggcatggggggcttaacaacttgctcagggtcacaaagctaggaagtcacaatgctaggagacagtatttgaactcaggcagtctggcttaactaacagtacctataattaggtacatgggtccattggatatcagctgtgaaactttgacaattacttggcccctgtgtgcctcagtgccctcatcctcatccataaaatgagggtcttagtagtacccacatcatactaggtgctatactgctagggcatcaatgttatatatatgtgaaatactatactgctagggcatcaatgttaaatatatgtgaaatgattaaaatagggtcaaattctaggagttatgaaagcattagtttttattactaataataggttaagggccaagcacagtggctggtgcctgtaatcccagcattttgtgggggctgaggcgggcagatcacttgagcccaggagtttgagaccagcctgggcaacatagtgaaaccctatctctacaaaaaatacaaaaagtagccaggtgtggtggtgcacacctgtagatccaactactcgggaggccgaggtggaaggatcgcattgagcctgggaggtcaaggctgcagtaagttgtgatcacgtcactgtactccagcctgagtcacagagtgagaccctgtctcaataataataataataaatagattgttagtataactattattattaacagccctcacttcttgagctccaaccgtgtgccacacagggtggtcagctcttatacaagcaatcttgccttgaattcctaacgagggggtagagaggaagatctccttcacagaggaagactctgagacccagagagaggaaggtatctgttcaagttcacacagcaagggaagcggcagagtcagatgtcagacccggctgcagggggctggctcactgtctgatgacgagacaagcagcggtcgtgtttataaagatattatctgttctccagaccctgtgaggcacccccgttcccaacaatgacgagcacttcagtcacctgggtgaggtcacttggcatcatgctgaagctgagagagagaaagtgaatgacttcttgtgaagtcattcattcagcactgtccccttccccctccctccgcccgcctcccagccttggaatctcagccctgattcttgctttgctgtgtgatgctgcataaatgctttcatctctctgagcctccaaggtgtctttttttttttttttttttttgagacggagtttcactcgtttcccaggctggagtgcaaatggcgcaatctcagctcactgcaacctctgtctcccaggttcaagcgattcttctacctcagcctcccgagtagctgggattacaggcatccaccaccacactcagcaaattttttgtatttttagtagagatggagtttcgccatgttggtc[131 bp omitted]ttggtagggtaaggcagtgggcaaaatatcaagtctggaagtggacagacacattttaatcctatctctgccaccctcttgctgtgtaacctcaagcaactccatctccctctctgaacttcccctgaaaacccctacctcctgaaggatagagcggggacccagtgagtgacaggcagggtgagactagcattattattgtgtgctgctctgaagcaggaggccctgcaggtcccagctgtgtgggagagtttcagggaggaaccccaactggccagaccagaagaactagcatctcgggagggagtgggacccagggtggagaggtacctcttgctcaggcctgcccagattctaggcgctgacccccgcctggcccatgaccagagaacagaaggaggtttgaatgcagggcaccacttaagcctgctgcgtggtaggtggctggctcttctgggtcctttgcagattttatggcagagaatctagaatctggctcaggggtcagtgcggaggcagctgccagcaatacagatcactcccaggcctcagacaagcccaggaccatattcactctggatttctcgtctccctgtggcagaccaggctctgacgccagtgaggttcccagcctgactcaggcccactccctctgggacacactgtttgtgacaagttagggaaggagtggagtcagggatggggctgactgtataattttcgggccccagtgc[143 bp omitted]tgaaaccccatttctactaaaaatacaaaaaattagccaggtgtggtggcgtgtgcctgtaatcctagctactccagaggctgagacaggagaatcgcttgaacccaggaggcggagggtgcagtgagctgagatcgcaccattgcactccagcctgggcaacaagagcaaaactccattctcaccaaaaaaaaaaaaaaaaaaaaaaaaaaacaggaaagagtgctgttaaaggtactaaaatagaaacacttttttttcctttcttctgcctcaatcttttttttttttttttttttgagacagtctcactctgccacccaggctggcatgcagctcacagctcactgcagcctctctatctcccggactcaagcaatcctcccacctcagcctcccaagtagctgccactacaggtgtgtgccaccatgtccagctaatttttaaatttttttttgtagaaaaagggtcttgttatgttgcccaggctggtctcaaactcctgggctcaagtgatcttcctgtctcagcctcccaaaatgctaggattacgggcatgaggcactgcacctggccctcagcctttctcttgacccctcatggtgtttaatgttatgttcccttgggcacagagatacttgtgggaccagcacagatcttcaaaggtggctagggaccctgccccacaacgtgggcagcctggctgggttccccatcccaccagatgcccaccgccatgttccaccccaagataccatgaggcacaggtacccaaccctgatcttcttgtggcgtgcctgcagcaggagtggagagtgccagtgatcacggggcagagttaagaagggaacaggccaggcacggtggctcaaacctgtattcccagcattttgggaggcccaggcaggcggaccacttgaggtcaggagttccagaccagcctggccaacatggtgaaaccctgtctctactaaaaattcaaaaattagccgggtgtggtggccagcgcctaaaatcccagctactcaggaggctgaggcaggagaatcgcttgaacctgggaggcagaggttgcagtgagccgagatcgcgccactgcactccagcctaggtgacagagtaagactccgtctcaagaaaaaaaagaggtggggacaggagtggaaacttgtcccagagaggtgaggctgcctcatcatgctttcattatctcattagtcttagcttacaaaacagaaattcaaagatacatttacgaatttctacacagtgaccacagagcattaaacccaagagcagggctcttctgaacacggggagctgtcgtctacattggtcagatgcccatgaagcgggattcagtaagggacccagtttgcagaggggctgggggatgaactgatccaagaatccagatgtcacatacctgaaggtagaggccaagggacacctacagtcccagaggacctaggaatttgggtgtctgcactcccgggactcagagcactatatctgggtcctcaagggaactttttgaggcaggaaagagctgtctccagaatgacagcctagagtgctcaagtgggggaccctggaggactgtagaggcccagaacaggcacctgacccagcctaggggtcagggagagcttcttgaaggaacgggcgccgtagatgagacctgaaggatgaagtcagccaaagagctctgcctgccttgttcatgacagtccccagcccttagcatcactttcccatcagtttattcaaccaccagatgttccctccgtacgcagtatgcaccaggccctctgctgtaccaagggttcagtggtgaccaagacagcactcactcccaggccagagcgggagacagactcaacagcagtgatgatcccaggtagtgaaggccatgatgagagatgcacaggatagaatgatcagggctgggaatggggaggcacaggtggagctgtcagggctataatgaaaagcccagggccaggagcagtggctcacgcctgtaattccaacactttgggaggccgagacaggcaggtcgcttgagcctgggagttggaggctagcctggactacatggtgaaaccccatctctactaaaaatacaaaaaaaagaaagccaggcgtggtgtggtggtgggtgcctgtaatcccagctactcgggaggctgaggcagaagaatcgtttgaacctgagaggtggaggttgcagtgagccgagattgcaccactgcactccagcctgggcgacagactgagactcagtctcaaaaaaaaagaaaagcccagaggaagcatctgacctgccaggacaatcagggagggcttcctggagaaagagacttaatataggaactaaaagctaaatgatgagcagggcttttgtggaatggggagaggtgcctaagcaaagggaacagaacgtacaaaggcccagaggtgaaagggaagcgagttttattttttgtttttttccactttcatggaatgagacatgctctatggtgctgggaacagcagtgaccaggacaatgctggctctgcctcatggagctcccagtgcataaaggacacagatccatcgcccatgatgacccagggtcctcagggatgggatgacagagctcaaaagggggtgcctgacccagccaggaaagtcagtgagggcttcctgaaggaggtgccaactgaactaaggctggaagaatgaggtgcagctgattaagggaaggaggggggccaggcgtggtggctcacacctgtaatctcagcaccttgggaggctaaggtgagtggatcgcttaagtccaggagttggagaccagcctgggcaacacagtgagaccccatctctataaaaataaatagataaaagaaaaaaagggaagaaaagggcagagggaacaacgtaggcaaaggcctaaaggggggaagcctaggagttcctagaaatttccagcagccggtcaggccagaaagggtggaaacagaagggcctacaaactaaaaaagcaaaactgccaaacactaagggggacatgcctctcaccctcttctcccagctatgaccttaagagttgaaggcctccattcctagagagccggctgtgggacgcgtggctcccagaggtaccgataactcagatgtcctgcctaggggtcaaggggccccggatgcctgggctggaaaccacagcagcaattcctgtttttcctccgtatttaattcggtatcacaggagcaccaataaatagtttcttcccgcccctgcaatcttcctcctgccccgggcagggccttaggggccggcgatcccgtcgggggcaaggcacctgcaacccagaacgcagcagctcaggccagctgaactgccgcgcctgcggaattcccgggagagttccaaagcggtgcgtccaagttttccggcagtgggcggggcctaggaacgcccccgcgccccgcgccggcggagcctcgaagggacttccccccaagagggcggggccactcagggggcgtggttttcgtcagcggcggtcacgatgacgtccatccaaatgcgcatggcttcggggctcggagccaccatgtagaaaaggcgttcgtaggttttgacgcagaaggtcaggcgggggttggggctctggaataagcagaaagtgagggtaattcagacaaaagacaccggccacagtctgggtgcgaacccagccttgctacttatagtctgtgtggcactggacaaggtacttaagtatctgaatgtcagtttccctgtcttcccaaatgatgccacctacctcactgggttataaggattaaatgaattaacacaaggaagtgcttaaaattatcatatgtagagcgctattgataaattaggggcaagataaattttttttcttttttttttgaaactgagtctggctctgtcgccaggctggagtgcagtggcgcaatcttggctcactgcaacctccacctctcgagttcaagcgattctcctgcctcagcctcccgagtagctgggactacaggcgtgtgccaccacgcccagctaatttttgtatttttagtacagaccagggtttcacagtgtttgtcaggatggtctcgatctcttgacctcgtgatccgcctgcttcggcctcccagagtgctgggcttacaggcgtgagccactgtgccaggccgagaaatttaaaagtaggacttatgacgccttctctcagcctaacttctcctatattagaaatacaggcattcaaattccacctccccaaaatctaggtccccttgtacctgggaaaagttagtgtctagaatccgttatttgagtacccacttgccaatcccaaattgagtaaatcccttatgtccataatctgtttttagccctctcaataaccctgatggaatgggttgatgcgtacccattctacacgtgagaaaactcaggccggccgggctgggtggctcacgcctgcaatcccagcactttgggaggttgaagcggattgattgcttgaactcaggagttcaagaccagcctgggcaacagagggagaccccatctctacaaaaaaataccagaaaaacaaaacaaaacaaattagctgggtgtggtggcacacacatatagtcctagctactcaggaggctgaggcaggaggattgcttgagcccgagagatagaggctgcagtgagctatgattgtaccactgcactccagcctggtctatggagcaagaaaaaaaaaaagaaaaagaaacaaagaaaactaaggctaaaggctaaagaaaggaagtcactttcctgatgtcacatagctgagattccaacctaattgctaaaaagccacagtttggttattctccacagagctttctaaatattgtatcagttgccaacatttaaatttttggcactgtgctttatacaagttccaattcctgagttctctgggaaaaaataaatataagacaacaccatgggacccactcccacttggcaactgttggcaggagccaactaacaaccatctcctttatttatttttcatttaaaaaataaaaaaaaaaaaacagagatgggatcttgctatgttgaccatgctggtctcaaactcctggcctcctgcagtcctcccatcttggtctcccaaaatgttgggattataggcatgagccacgacgcctggcagatcatctcctttagatgctcccaggctgcccgacccttgctgtgacctctccattcatttattcccagttggacatcagagtc[131 bp omitted]accagcctggccaacacagtgacaccccatctcaactaaaaatacaaaagttagccagctgtggtggcacgcctgtaatcccaactacttgggaggctgaggcaggagaatcgcttgaacccgggaggcagaggttgcagtgagccaagatggcgccaccgcactccagcctgggcaacagagccagactccatctaaaaaaaaaaaaagagccacgtgtggtgcggtggttcacgcctgtaatcccagaactttgagaggctg[132 bp omitted]gagaattgcttgaaccagggaggcggaggttgcagtgagccgagatggcgccactgtactcaggcctgggcgacagaatgagactctgtcttaaaaaaaaaaaaaaagaagaaaattaacagtggctgaaggccagagtctgggctcttaatttttagtccctgcagtcaggtgacctgtttgttttctctgcgacaaacacgtactcctatgagtaccctgacaggagaagctgcgggtggctttccccaggatgagccagggatgagataaggcctgactccaactgagtctccaactgggaggtcagggtgacattgaggggcttcaccttgaaggcacagcgtaagtggtcataatagacttcctcaatggcctggaagtagatgacacctttgagcttggtctcttccttgtctggtaggggaggtaagagaaaaagagagccagtgagaaaggtgtgtctgtgtgtgtcgaggtgagggtcattggccctaagtcctgagactggatttgggtaagaaacatggtgacaagagtctgaaggtctctaaaggttgggaggtgagtgaatgttaacgctggatgggagactgggcacagaaactggacatgattggggagtggggtctgtggagctggaatcctaggccctgaatgctcggcctctgagaagggaaggaactcagggagtgctcaagtgctttctaggtataatctctaaccctctcaaactctcctggaggggtaagtacatttatctccatctgacagatgtggaaaccaagactcagagaagttaaggcacccagcacaagtcacacagccagagctgacagagccaggactcaccaagtagagtcaaatggtcatacaggttagggaagaaggatttgagacaatacaagcgtccaaggaggctgggtgcagtggctcaagcctgtaatcccagcactttaggaggctgaggcaggcagatcacaaggtcaggagatcgagaccatcctggctaacacagtgaaaccctgtctctactaaaaatacaaaaaattagccaggtgtggtggcatgagcctgtagtcccgcctattcaggaggctgaggcaggagaatcgcttgagccggggaggtggaggttgcagtgggctgagatcgcaccactgcactccagcctgggcgacagagcaagactctgtctccaaaaaacaaaaacaaaaacaaaaacaaaaaaaagtgtccaaggagaggtttggaataattgattctcctagagaagaaggacaagggccccagactcctggccattggggggctgggggcagctgacagtgcaggttcagactcatgggtgtcttaggaacatgggccctgggaagcttgaattgtactaaactgttatctatgtccctgaggaggactgggggtttgaattctgggtggcttaaagaggggctggggatctggattccagggtctggaggagagagagagctgggagcctggactcctgggttgtagggaagttaggagctagggaaccaaacttctggatcctggggaacatggaaagtgggggccaggacttctggtgcctgtagaggaaaggcctccggagtggaattccagcgtcctggggcccatggtggccaggctgggcttacccgcatagtaggccaagcggcgggcttggcggtcaaagcagaaccatcgcttcctccaggtcttgatgcggccgcccatcttcaccaggggtccacggcagcagcacccagacacctgcacatgtgggcagttttccgggttgtggccccatccctccagatgctgccggagatccaagattcgcgggcctggagggtggggtggggtgggtggggcctggggagcaaagagacggggcagctgatgtaaggggcgggggattctacagcctggagcccctcgaggggagcaagtcatagcagcttgcatgtaaggcccgctacagcctttagagggtaatattaactaggaccatctgacaaatgcaacggctacgtggattgactgtgatgctctgcccaggactttatggacatcagctccttggcacttcatggcaactgtgagccccattttacaaatgagcaaaatgaggtacagagagatgacataatgcacccgaggtcacacagagcttctaggcagcagaactgggacacgaacccaggtatttctgaccctagagctcaccctgaaacatcagaggcctatcaaaagaaataaagatcgggccgggtgtggtggcttatgcctgtaatctcagaactttgggaggctgaggtaggaggatcccttaggcctaagaattcaagggcagcctgggcaacatagtgagatcctgtctctgaaaaaaaaaaattttttttggaaaaaagaaatgaagattggagcctgtgtggtggcttaagcctgtaattccagctactcaggaggctgcggtgggaggatcccttgatcccagaagttggaaaccagcctgggcaacacagaagaccccttctctatttaaaaaaaaaaaaaaaaaaaaaaaaaaaaggagagagagaagagaagctatgtgcagtggctcatgcctgtaatctcagcactttgggaagctgaagtgggaggatcacttgaggctatgagttggagaccagcctgggcaatatagtgagaccccatctctactaaaaatccaaaaaattagctgggcctagtgctgcacacctgtagttccagctactaaggaggctgagcccaggaggatcacttgagcccaggagatcgaaattgcattgagctatgattgcaccactgcactccagcctgggtgattgagtgagaccctgtctcaaaaataaaaaagaaagagagagcttgtttacattattattgttgtgatgaaattaatgaatataatcctctgctaagtactttctaggtataatctctgccccctcaaactctcctgaaggggtaagtacatttatctccgtttcacagatgtggaaaccaagactcagagaggttaagtcactcggcacaagtcacacagccagagctgacagagccaggactcaccaggtagagtggtcacctcagatggtcatacaggttggggaggaggatttaaggcaatacaagtgtccactatttatgagagcctgaccatgagctggtctgatccaacctattcttcccaaataatccctgcaaacagtggtatgattccggaggtcaaactgaggttcagggtagtacatctcagatttcttcatgcaagcagatccgctggggattttgttaaaatgttaaaatgcagactctgattcagtcatttcagggtggagtctggagtagggggagaggttctgcatgtctgacaagctcccaggtgggccctgatgctgctgttccaccagccacactttgagtgtcaaggagttagaaaactgaagcaggatgggtgcggtggctcacacgtgtaatcccagcactttgggaggccaagaggggaggatcacttaaacccaggagtttgagaccagcctggggcaacatggcgaaaccccgtctctacaaaaaatacaaaaattaggctgggcgtggtggctcacgcctacaatcccagcactttgggaagccaaggtggggggatcacctgaggttgggagtttgagaccagcctgaccaacatggagaaaccctgtctctgctgaaaatacaaaattagccaggcgtggtggcgcatgcctgtaatcccagctactcaggaggctgaggcaggagaatcgcttgaactcgggaggtggaggttgcggtgaatcaagatggcaccattgcactccagccttggcaacaagagcgaaactccatctcaaaaaaaaaatacaaaaatacaaacattagccaggcatggtggtgtgtgcctaggatcccggctaattaggaggctgaggtgggaggatcgcttgagcccaggaggtgggggttgcagtgagccgagatcacaccacggcactccaggctgggtgacaaagggagaccatgtctcaaaaaaaaaaaaagaaagaaaagaaagaaaactgaagcaaggccagagcaagaagggatgagaaacagagatgagatctgctggttggagacaggagagtgaggtggggaaatgagaaggattagggaggagggaaaggaagggagggaaaggccaggtttaaagagtacccgctgggcctgcaatctccccaaatccacacagaaagaccaaggatcaccactgtgtgtggaagctcccgctctgtgtcaggcactatgccaagtggtcactgtgattacctcgtttcttctccaaaagaacccattaatgttcctgctagacagatcaagaaactgaggctttaagaagaggtgactctccaaggtcaccaaactaggatgtaggggagctgggccccaatctaggaggagaccagggatgggcttgggactccaccactgcccggctgtgtcacctccacagaactcctgcccctctgggagcctcagttccctatgctaaaacaccagggttatcacagcactctcctctggggctgtttcaaggatgagctggctgccctcagggtctctcacctagaggttcctcttctaggtgtgaagcccagggacacacttgctcacgtgcacaaaagatagcaggggtgtacggcaggggacaaagcacacagcaggggactgtttaataaatgatgatgctagaagccaggcagaacaccagagcaggagcaattctgtttgtttgtttgtttgtttgttttgagacagagtctcgctctgtcacccaggctggagagcagtggtgtgatcttggctcattgcaacctctgcttcccagttcaagcgattctcctgcctcagcctctcgggtagctgtgactataggcacatgccaccacgcccagatgatttttgtattttcagtagagacggggtttctccatgttggtcaggctggtctcgaactcctgacctcaggtgatctgcccacctcagcctcccaaaatgctgggattacaggcgtgagccaccacgcctggcctgtgcttcgtttttaatgagcacaagcttatgcctaacaatgcagaagaccccactgccgttcctgccttattttgctccctggctcttatcagcctctgacatgctatttattttacatattgatgttgctttgtgtccatcttcccccttaaaacatcagcttcccccaaaggtggggattgttatcttggtcactgctatgacccagggtctagcacacagtaggcactcaataaatatgggctgaaatgaataagggaaggacaaatggtggtaaaaacaaaaaggttgggaaggatgtgcttatttatgagacaaattcacaaaatatggcttgactggtgcatgtggaaaagtataaacacagatttgaaggcttctcagcagtagaagtgagatcaggaagaaagtgaccactttcttaatactttatctatcattcttttttttttttgaggcagggtctcactctgtcactgaagctggagtgcagtggggcgattatagctcactgcagcctccacccactgggctcaagcaatcctcccaccttagccttttcccgagtagctgggaccaaaggcatgcaccaccacacctgctaattttttaaatttctgtagagatgagggtctgactatgttgcccaggctgttctccagctccgggactcaagtgatcctcccacctcggcctctcaaagtgctgagattataggcgtgagctatggtgcctagctttatcattctttataacaaaacgcattgattctatgaatgttattagtataggcaaaaatgtaatttatgtaagggagttgtcagctaaatcaagaatgtgaaaaagtcaacaggataaattatttgattatttccacaaataaatagcattttctttaatggggaggcagaactgttagagattaaaagatttaagagacattaaaccaaatgcatagcgtgtgctttgcatatagattcaaataaatcaactgtgaaaagatattttaggtcaggcatgatggttcaggcctataatctcagcactttggccagaagggaggctcgaggccaggaattcaataccagcctggccaacatagtgtctctactgttaaaaatggaaaacaaggccaggcacggtagctcatgcctgtaatgccagcactttgggaggccaaagcgggtggatcacctgaggtcaggagttcaaaaccagcctggccaacatggtgaaaccccgtctctactataaatacaaaattagccaggcatggtggtgggcgcctgtaatcctagctactccagaggctgaggcgggagaatcgcttgaaccctggaggcggagattgcagtgagccgagattgtaatactgcactccagcttgggcaacaaagtgagactccatcttggaaaaaaaaaaaaaaaaggaaaagaaaaataataaataaatttttaaaaacatattttggagacaatgagagaaatgtgaatatggactatatattacaatataatgaaattaataatctcataagatgtgacaatggaatttttgttatgttaaaaaaaaaaaaaaacttattggccaggcacagtggcttacacttttaatcccagcactttttgaggccaaggcacacagatcacctgaggtcaggagttcaagaccagcccggacagcatggcaaaaccccatcgctactaaaaacaaacaaaaaaaataaatgggtgtggtggtgggcacctgtactcccagctactcgggaggctgaggtagaagaatcgcttgaaccagggaggcagaggttccagtgagctgagatcacatcactgcactctagcctgggcgacaagagtaaaactctgtcccccaaaaaacaagcctatctattggagatacacagtgatgtttgagtgaaaggatacaatattttgctttaaaatatttcagtgcagagtgggatgtaggtatgggattagtaaaataaaattggtggctgggcaccaatgccctagaattattcttataattctagcagcttggaggctgacatgggaggattgtttgaggccaggagtttgagatcagcctggacaacatagcaagactctatctctacaaaaataaaatacattaaaaatataggagtgcagaagacttatgagaaaaaaagaaaaatattaaaaataaaaataaaatatatatacctagtacatacacaaattaaaatgttaaataaaataaataaaaagttggcaagtacaagattcaatattgaaaatgattaaagctgcgcagtgggcacctgggggtctattaatctactccttctctcatgcatatgcttgaatatttctatcgtaaaaaggttttttgtttttttttttgagacagaatcttggtctgtcaccaagactggagtgcagtggtgtgatcttggctcactgcaacctgcacctcccaggttcaagcaattctctgcctc[221 bp omitted]ttggttttgatttttttttttttttgagacagattttcgctcttattgccaaggctggagtgtagtggtacaatctcggctcactgcaacctccacctgcgggttcaagtgattctcatgcctcagtctcccgagtagctgggattacaggcatgtgccaccatgcccggctaatttttgtatttttagtagagatggggtttcaccatgctggccaggctggtcgcaaactcaggtgatccacccgccttggcctcccaaagtgctgggattacaggcatgagccactgcacccagccaaaaacaaaattttaaatgatttttaaaagttccagcatggactgggcatggtggttcacgctataatcccagtactctgggaggctgaggcaggaggattgcttgaggccaggaataagtcccagcatggacttgtcctccttctgtactgactgctgacattgtcaccaatgtacagaagaggaaaatgaggcagagtagagcaagttacccgaggacctgccacacatggagatgaccatcatccggtcatgggaacaggaactggtcctctgcagttccctttcccttgccaagcccaggacaattttctgttcaattggaggagaggaaagggtcagatgtaagaaagggcataggtcagggggagaaacagagcagggagaggtgggcgtgagggcgggggtgggactgaccgtgatggcaggaacagcagggcctgaggaaccttccgtgccccttcttgttccttcctgtggattcaggatgaagcactcaatgaggatcccagcccataagatggtagggtggctggagaatgtcctagcttctctgttctgagggtacagggactgggggcctggactcctgggtatgagggaggatgggctgggggcctggactcctgggtctgagggtggaggggctgggggcctggacccctgggtctgagggaggtggagttgggggtctcccaggtctgagggaggagaggctggggcagtcttctgttccgaagaggatggcctgggctctcacccgggccttgagcagccgctccctctccgccatggcctgctgcaggagccgctccatgtgggcaatgtctggatggatggccccacagctaggaggagggaacacagacggggtgggttacagtggctgggcctcttcttccatctccccaccttctctctgatgtctcacctattcccacggccacagttcagcagctggtagagggggtatctgccggagtcccccactgctggcgggagagctgaggcctccagggattctagggtagaggggaccaggttacagggctggatacaccctggcctgagcctatccacttctcccctgcaggcataggtgcgggtttcctccatcctctgctgcaggatgagtgctgatgtgggaaggaagtggggaacagggggatcctcaccagtacaatggaaggacagaggtcggggggatcctctctggctccccctctccccccttttccggggcaggctcccagtcctctggaggccaatggagccctgaaaacacaaaaggctcatgagcataggaaaaaggcttgatctccaacctaagtcagagcactgcccagtgaagccaccacccagtcagcacaaatcaaaacactactgtccatgtgctgagtgaaaggacctcacaggggtatgatcccgtttataagaaatatcaagctgagcacagtggcttatgcctgtaatcccagcactttgggagtccaaggcaggtggatcacctgaggccgggagctcgacaccagcctggccaatatggtgaaaccccatctctactaaaaatacagaaattagccgggcatggtggcacgcgcctgtagtcccagctactcgggaggctgaggcagaagaatcgcttgaacccgggaggtggagattgcaatgagctgagatcgcgccactgtactccagcctgggcgacagagcaagactctgtctcaaaaaaaaaaaaaaaaaacacagaaaagaaaaaaagaaatgtccggaacaggcaaattaacatagaaatgggaagtagaattgtggttgcccggactggggtagatcggggaaccgagaggctaagggatgcagggtttcttttgggggataatgaaaatgttctaaaattgattgtggtaatgtttgcgcaacgttgaatatactaaaagacacagaactgtacattttaaatgaatgaattgtatagggacgtgaattatgcctca[212 bp omitted]gaggcaggagaattgcttgaacctgggaggcaaaggttccagtgagccgagatctcgccactgaaatccaggctggacgacagagcgagactctgtcgcaaaaaaaaaaaagtcccactgcagccaggcgcagtggctcacacctataatgccagcactttgaggctgaggcaggcaaattgcttgagcccaggagttggagatgagcctgggcaacatggtgaaactctgtctctacaaaaaaatagaaaaattagctgggcatagtggcacgtgcctgcagtcccagctactgtggaggctgacgtggaaggatcgcttgaaccccggaggtcaaggttgcagggagctgagattgtgccactgcgctccagtctgggcgacagagtgacagcctgtctcaaaaaaaataagtaaaacaaaaaaacaaaaaacccaccgtgctggtggctatgtaggaaacccagatgccctcacatgatactgggggtgttctactggaacaagctttatggagggcaacttggcttttttaaaaaaaatctgaatgacaaatgcataaaccatggagccccaattccaattctagaaattcagcggatggatacactcatacacatgcaaagtgatctgagttcaaggtgattccctgcagtgccatctgtgctagcaaaagcctggagaccacctaaatgcccatcagaaggggacaaggtaaatgaaccatggcttatgcactccatagaccattttttttttttttgagttggagtctcactctgttgcccaggctggagtgcagtagcacaatctcggctcattgcaacctccgcctcctgggttcaagcgattcttctgcctcagcctcacgagtagctgggattacaggcatgtgccaccacgccaggctaatttttgtatttttagtagagatggggtttc[148 bp omitted]cctacatccaggtagaacataatatccaaaaaagaaaagaaaaaaaacagaacataatatccaagagaaaaccaaggccaggtgtggtagcgtgcacctgtagtcccagctactcaggaggctgaggtgggaggatcacttgagcccaggaggttgaccctgcagtgagccatgatcatgccactgcactccagcctgggcgacagtgagatctatctcttaaagtttttttttttttttttttaagcgagtacagaacagcatagaataaactaggtatgcataaaagagggagaaagtacatacatgactagctgtgtcaacacagaatatctctggggaacacatgggaaattggtaaccctggtggccctcaggaagtgaacagcgtaggagggggaacaagagccgcagagtcttctctgaatatcctcccacaccatgtgaattttgaacgaggagaatgttaactttttaaaagcaaataaacatgacaactaaatgcaacctgtgttcctgagccaagaaaaaaaaagtttgtttttttttgtgaattttttgctagaaaaaacactggtggggccaggaacagtggctcatgcctgtaatcccagcactctggaaggccg[134 bp omitted]gaggcaggagaatcacttgaaccagggaggcagtggttgcagtgagccgagatcacaccactgcactccagcctgagcggcagagcaagactctgccaaaaaggaaaaaaaaaaagaaagagcaagagagagaaaaaggaaggaaggaaggaaggaagggaaggaggaagggagggagggagggaaaaacattggtggaacaactgacaaaatacaaataaggtctgtggattctaatagtgttgtctcagtggtagtttcctgaaatcgatcattgaactgtggttgtgtaagagaatgggcttgacattaggtagtaaatttaggaatatttaggggttaaggggaatcatgggtaagaaaataatgggccaggcatgaaggctcacacctgtaatcctagcactttgggaggtccagggaaggcagatcactttagctcaggaatttgagaccagactggggcaatatagtgagaccccatgtctacaaagaatacaaaaattagcctggcgcatgtctgtaatcccagctacttggggggctgaggcaggagaatcgcttgagtctgggaggtagaggctgcagtgagccaagatcgcaccattacactccactccagcctgggcgacagagcgagactgtctcaaaaattgaaaactaaaaaaaataaaaactctgggagttgagaaatgttagctccacttcacagagaagaaactgaggctcaaatccccgtgctttacttgactttttccttccttccagccacattcccagcacttcctagctgggagatattagatacttggcactgaggaaccaagtgggcaggtcagaccccagctttgtctgcagggcacttatgttgtaggaactgcataagccatcagcaggccatagaaacaggccggttcgggttcaaatcccagctctgccacttcctgggtgcatgacgtaggcaagtcatttctcttctcaagcgaggtgtcctctctgtaaagtgggtaacatctcactgcccttcctgggttgttgcaaggattaaatgagtgacctcctgcaatgcatgtagaagcatgcatggcccccaggtgagatccaggagctaagcaatgatccacattggtgggtacagggtgcacctgggcttagaggccttctgtgcacaggggccaacaagtcaggtgacaactccataggactggacatggcgtcccaccaaatattttcatatatgcaatttactaataagggtaattgctatcctaagtcacgttgcctggcaacacagctgacacctaccttcatcaggtttccaggggaagcagccagaaagttaatttcccatacagaagaacatctgctaacccttcacccaaataataacggaacctgcttgtgagggttcttcccaagaaaaaatgaaattttatatattaggttgagccaggggaattgccagtatacgactgtttcttgcctccaaatattagcaattccataagattcaaagtgataaaatggtttagaacagaccctgacctatattaagtgctttaaaattagtgttattaatattgattaataaataacaagattttttttttttaagatggagtctcgctctgttgcccaggctgtcatgcagtggtgcgaccttagctcaccgaaacctccatctcctgggttcaaactattctcctgcctcagcctcccgagtaactgggattataggcacgcaccagcacacccagctaattttttttttttttttgagacaaggtctcgctctgttgcccaggctggagtgcagtggcatgatctcagctcactgcaacctccgcctcccaggttcaagcaattctcctgccaaagcctcctgagtagctgggactaggctaatttgttgtatttttagtagagacagggtttcaccatgttagccaggctggtctcgatctcctgaccttatgacctgcctgcctctgcctcccaaagt[135 bp omitted]ttccgggttcaagcgattcttctgt[134 bp omitted]gcctcccaaagtgctgggattacaggtgtgagccaccgcgcccagccaattttttgtatttttagtagagatggggtttcaccaagttggccaggctggtcttgaactcctgtcctcaagggatccacccacctcggcctctcaaagtgctggattacaggcatgagctgacgcacactgttattatttatttatttttaagacaaagtctcactctgtcgcccaggtctggaactcctgacctcaggtgatccatctgcctcagcctcccaaaatgctggggttacaggcatgagccaccaagcccagcccacacactggtattcttaacagtattgcttaaactgcaggatggcttgagcctgggaggcagatcgtgtcactgcactctggcctgggtgacagagccagaccctatctcaaaaaaaaaaaaaaaaaaaggaaaaaagaacctaagttctgaaaacagagtacctgggttcaaatcccagctctgccacatactagctggttaaacaacttaacctctcttggtgtttttgcctataacatggaaacaagaacctagctcacagatttgttgcaaagacaaatcagtaagccaatcagcatgaagcatttgtaaccatgccttgcacactataatgactcaataaaaccattgttattattattgctattgttaatgttattattattattattgtaaagtcattaaaaatgaggcaactgtaaatgtatcaatgtaaaacaatctccaagatagagttaagttaaaaaataaaaaccagtgggccaggcacagtggctcacacctgtaatcccagcactttgggaggccaaggtgggcagatcacctgaggtcaggagttcgagaccagcctggccaacatggcaaaaccccatctctactaaaaatacaaaaattagccaggcttggtggcgcatgcctgtaatcccagctactcaggaggctgaggctggagaatcgcttgaacccaggaggcggaggttgcagtgagttgagatcgcaccattgcactccagcctggcaataagagtgaaactctgtctcagaataaataaataaataaataaataaataaataaataaaataaaagccagtgagaccctatctctacaaattggacccatgcgcggtggctcatgcctgtaatcccagcaatttgggaggctaaaacaagaggaccatttgagcctaagggttcaagaccagcttgggcaaaaggaagaccccaactctacaaaaataacttcaaaaatcagctgtgtatggtggtgtgtggtgcatgcctgtggtcccagctactcaaggaggatcacctgagcctgggaggttgaggctgcagtgagctgtgatcccaccattgcactctagcctgggcaacagagtgagactctgtcaaaaaaaaaaagctagaagaggacttgaaatgttctcaacacacagaaatgataaatacttgaggtgatagataccccaataccctgacttattacacattctatgcatgtaatagcatatgtaccccataaatatgtcccaaatatatcatttttaaaaagaaaagccaactagtagctaatatacacatttttcagaaggacaggttgaatatcccttctccaaaatacttgggaccagaagggtttcagatttgggattttttttcagattttggaatatttgggttgagcatccctaacctaaaactctgaaacccaaactgctccaatgtgcatttccttggagtatcatgtaggcactcaaagagtttcagatttttgagcattttggattagggattttttttgtttgttttttgagacaaagtctcactctgtcgcctaggctggagtacagtggcataatctcggctcactgcaacctctgccttctcaggttcaagtaattctcgtgcctcagccctgcatcaccatgcctggctaatttttgtatttttagtagagatggggtttcaccatattggccaggctggtctcgaactcctgacctcaggtcatccgcttgccttggcctcccaaagtgctgggattacaggcatgagccaccatgctgggcgcctgttttaactataaatgagctgcccccccaccacccccgcagttttaaggaagtctagaaggattctcaaaacacaagtagctgcgttacttctgagaaggggagaccttattaaaatatgctgtttggttgcttttaaaatctactcctgggtgcacatgttcccatttcgccagggcaggggtgggtgttacacagaaaaaaaataacaataataaagctggagtcataggaataacccttggccaaccttccctatcccccaccggccccatacagaaaatcagagtggaagttctggagaccccagttcggggactctgctgttagcccctccctcctcactgaccaataagatatatggggaaacagaggccgtgggggaggcacctgcagggagctgtggacagaaaagaggcaggaagaagtaggggtggcagcggagtgggccacggcatcctggagcaccagcagctggcggtctgtcttctgggtgaacagcagctgcaagagatggggtgaagtttcgtgggagcaggagagaccccagagcaactgccagtttccacgtgctctggcccatgcctctagtgccacccatttctcagaaagaaaaactaaggagagatggaatgtggtccttcgtgtccagtctcccaatgtagggctgtgggcagagactcctggctccctgaggaggggctgggggctggactcctgggtctgagggaggtggggctggggcctggactcctgggtctgagagaggaggggctggggcctggactcctgagtctgagggaggaggggctggggcctggactcctgggtctgagggaggaggggctagggcctggactcctgcgtctgagggaggaggggctggggactggactttcaagtctgagggaggagggactgagaggcatacaaaatccccataccttagtgagggccgggttgggctcagagaagtccccgccaggtgttccctgaaggcaattgagctcgagcagccggctccgttcctaccagaagatatggacagctacgtgtcaaagtcagaatgggctgtcccagctgctttccctaatgtcaggagacatctggggtgcagggaggtggtgggatgccccagggggaagtgaggacggtagggtagggcaggtgacaggtagctcacctgtgacagggcctgaagggcctcctccttcttccggctcaacccccggctctcggctgccatctgctcccccagtgacttgagctgctcttccaggacccggatccggtgctgcagagcacccctctgtcccggttactcatctgtcacggccccagccagctctccaggccaccctcccacagaaccacatctgcctggagggctggggtttactccagccactcccagagaccatgggatcggagtgtccagggctggggacccagcgttcagctccctggaccctcttcccttttgagggtccagaagagatctggggaagatgaagagaaagggatggacagagagaacagtaaccaagacaggccccaaaagacagagatgtagacaaagattcaggcaaaagaaaagatagaaatagaacagagacaagtagagacaacccgagacgaaggaaaagccagcgggagaggaaaaagatccagaagcaggtggggaaaggagacccaagaaaagctctttttttttttttttttgagatggagttttgctgttgttgcccaggctggagtgcaatggctcaatctcggctcaccgccacctccgcctcccggattcaagcaattctctgcctcagcctcccgagtagctgggattacaggcatgcgtcaccaccctcagctaattttgtatttttagtagagatgggctttc[132 bp omitted]tctgtgttaaatatggtcaaacatgcccattttttcccaagggtctcacaagtcagacccttgaatgtgaggctcccaggaaggatctgatgaagcatctttttggaatagaggcaaagaatgtggtggtgaataccaagtttgttcaaatcctggctgtggcgaggcacggtggctcatgtctgtaatcccagcatcttgaaaggccaaggtgggaggatcgcttgaatccaagagtttaagaccaggtgaaaccctgtctctactaaaaatacaaaaattatccaggtgtaggggctcgcacctgtggtcccagctactcgagaggctgaggtgggaggatcgcttaagcacaggacgtggaggctgcagtgagctgtgaacgtgtcactgcactccagcctgggtgacagagtgagacgctatctcaaaaaataaaaataaaaaaatcctggctctgtcccttactaaggaaacttggaaaagattacttaagcaccttgaccttcagcttctttatttataacgtgaaaaaaaaaaaacgtaatagaacttgcctcataagtttgttgtaaggattcagtgaggaaatgctcatgaaatattcaggaccatatctggcacatagtaaatgtttcattagtatcagctcttgttgttactattcagaagaacatgacaggcaggaaacaaggacagagaaaaaggcaggcacagagcaggggagacagagaggagcagcaaggggggcagcgctggtcaggcatgactcactctgtgctgcgccatgctggcctggagttcctggaccttggggtctggcacctggggcccagggctgtcccgatcctcctcctcctgccggctctcccgctccagttgctggaactccaggtcctcataggcacgttgggccacatccagttgttccctcatctataggtcggaacacaaaaagggtggaggcctgaatccctaagaccccagggagtagtgggctggggctgggactcctggtcagaggaagaaggtgactgaggacttggattc[142 bp omitted]accccgtctctactaaaatgccaaaaattagctgggtgtggtggtgcgcacctgtagtcccagctacacgggaggctgagatgggagaatcgcttgaacctgggaggcggaggttgcagtgagccgagatcgcaccactgcactccagcctgggcaacgaggcgagactctgtctcaaaaaaaacaaaaaagaaagaaccagatgccattacctcctgcacaccctgcagaagccgctcgcgttggtcctctggctgtgagtcgagctgtccctgggccttgcggagtctctggcgaagaccctctaggcgatcccgttcctggctcagccgcctctgttcctgaaagaacaacaaggttctcaccctcagcttaagcatagcgggagaagcagcagccagccatatctcagagcctgcctggggtgtcggctgtacaaaggcagggacttcatctatgtgattcactcctgtgcaggcctgcctcacagtcagcaccaagattttaaagaaatgaatgaggccaggtgtggtggcccacacctgtaatcctagcactgtgggaggccaaagtgggaagatctcttgagcccaggtgtttgagactagcctgggcaacatagggggagcccatctctacaaaaaaacaaaaaaattagtggagtgtgttagtgcacgcctgtagttccagctactcgggaggctgaggtgggaggattgcttgagccagggagattgaggctgcactgagctgtgtttgcatcactgttccagtctgggtgacagagggagacactgtctcgaaagggaaggaaaggagaaaagacagaaaagaaagaaagagagaaagagggaaggaacgaaggaaggagagagagaaagaaaagagggagggagggaagagaaagaaaaagaaagaaaaggaaaggaggagaaagagaaacaaaaaggaaggaaggaaggaatgatggaaggaaggaaagaagaaagaaaattaatgaatgcaaaacatattcatgttatgtgatacggtggatgcagaagtggattgtgtctgggccctgtcctccaagtgggaacacagccagttggaaagatcagggcagtaaaatccagagactgtgggaacccagaatgaagaacaatgtcagccagaggttgaggctgcagtgattgcactactgcactccagcctgggcgacagtgagaccctgtctcaaaatcaaaacaaaacaaaacaatcagggagcatttggatctgggaaaataaaaggagctagaagagcattttgggcagaggaagcggcttggcacaaatgcatgaaagttgaaaagtacaagaagtctgggggacaaactccagccagggtggaagaggatgtggtggtgggaagaacgtggtgggagaggacagtgggaaggccagctcgtccagctcacggggggtttggtcaacctggggatatggggagcctcagaaggactgaaaggatggggtaggagctaggaatcatccctctgggagatgggttacaggggtggagagcagctgcctcgggagtcctccaagcaatgagggtgagacctaagctggggcctgggcggtggggctgaaaaatagatggactagacagagaggatcaggaagcagaaaggataggacatggtggttgacgggcttggaggtgagagacagggaagtgtacagggcaaagtccaggactctggcctggtgaccaaagggacagcaagacaaacagtgtggagaagggagttgctgaggtcagccagactcctgggtcagagggaggaggggctggggcctggattcctggatctaaggaaggaggatctgggggtctggacttctgggtttgagggaggaggagctgggggtctggactcctgggacagagggagaaggggctgcgaccgagatttctggatctgggtgagaagggagtatgaagtagccagtaccctaggaagaagagcacatttctgtctcaggagagagggcctgggagaaatatgtgatctttgaggataaatgagggcctaggacccagcctcataaaattccaacatacacgacacttgcaaagaaaaaaactgacaaaatcacaagtcaccattttccaacctataatggtaactgacccaagcaatgaccactgatggatgttacaatcttcagataaaagattcttttttttgagatggagttctgctcccgttgcccaggctggagtgcagtggtgtgatcttggctcctgggagctgcaacctccacctcccggattcaagcaattctcctgcctcagcctcccgaatagctgggattactggtgcctgccaccacgcccagctaattttttgtatttttagtagagatggggtttcatcatgttggccaggctggcctcgaactgcggtggctcatacctgtaatcccagcactttgggaggccaaggcgggcagatcacctgaggtcaggagttcgagaccagcctgaccagcatggagaaaccccatctctactgaaaatacaaaattacccgggcatggtggtgcatgcctgtaatcccagctactggggaggctaagacaggagaatcgcttgaacctgggaggcagaggttacggtgagccaagatcacgccattgcactccagcctgggcaacaagagcgaaactgtgtctcgcaaaaaaaaagagactagggtgatcttattaggtcgggacaaccagagatgaggttcccaacactggctcaggaagcactaaagcacttctgaatacgatcaaacctctccctctaaccaacacccacttgcagaaacagaggcatgttcaagggcaccacaggcatgcgatcagccatgctctgcctataggacagaagactggatttttccaataaacagtatggggaagacacagcgggtaggaaccaccagagataaaacaatgggcaagacgtatcagccaatcacactgaactttggggacttcattcaaacaagccacctgttaactggcattttgagactgtctgggaaacacaaaaactaaccagaaataagacaatactaagaacttattaattttttatttttgagacagggtcttgctctatcgcccaggttggagtgcaatgttataatcacagctcactgcagcctctaccttctgggctcaattgatcctcccacctcactcttctgagtctgaggccacaggcacatgccaccatgcctggttaatttttgtatttttatttttcacagaaacggtgtcttattataatattgccaggctggtctcatagtcttggcctcaagcgatcctcccactttgccccgccccccgtaccccccccccaccccgcaagtactgggattacaggtgtgagccacttggcccagcctaaaaggatttcttatctgtcaatgatacactctaaacatatgtacagaccatatgatgtctgggattggcttttaaaactggggacgagaacaaattggagataatgaaacaagaatgtaagaatattaatcattgatgaagctggtgggcacaggacatgggagctgcctgactattgtggggtgggtttggaagttttctttttctcttttttttttttttttttttttgagacggagtctccttcttgtcacgcaggctgctggagtgcaatggtgcgatcttggctcactgcaacctccatctcccggattcaagcgattctcctgcctcagcctcccaagtagctgggactacaggcgcccgccaccacgccctgctaatttttgtatttttaagcagagacggggtttcgccatgttgcccaggctggtctcaaactcctgagctcaggcaatccgcccgcctcggcctcccaaagtgctatgattacaggcgtgagccactgcttccggccagtttggaagtttttacacacccacatttaaatagcaaacggacaggggacaaaggaagagccccaaaaatctcgcccagggagggagaaggaaaaccaggaggggcatctgcccctcactctctcaggagcccaaatgtcttcctttggggaatggggacaaccccggggcgcaggtggctaggagcacaccaacatccatggaccaggaaggacactgctgatgaagacccggtgagccaaacagacctgttcccgctgctggcggccgcgctgctccgaggccgcctgctgctccagcagctcccgcagctgctcctcctcccggcgagcggccactcgctccccagccagctcaccccgcagcaaggccacctccacctccatctgcggagagaatgccagggctgggggctcggacgcctaggtccaaggaagaggcccagggcctgaactaccggattcgaagggaggatggactccagggacctgaatttggagggaggaagagcggagggcctaaaatctgatcccacccgaggaaaaagctgggagtccggctttgcgggttccgcttgagttggggccaggcttcccaaggggtccgcagcctcacctcgatcctcagctccttcctctggcgctgtagctccttcactcgctgctccatcagggccacacgagtcaatgcctccagctgctgtccttgcaggcgccgcgccgcccctcgcaccccttcccgcgaagaggtggatgcgggaggtgtggccgccatagctatcggaggcgtagcctcgggctgaagttgaggggggcgtggttaagtggagatgcctcgccccctgcaatcactaagtaggtctggtccccacccaacatcaccctctgcgggtctcagtccatcagtccacttacctaacacaaccaccactcccataatctgtcgcaggctcttttctttttctttcttatcttttttttttttttgtcctgagatagggtctcactggctggagtgcagtggcgcgattacggctcactgcagcatcgacctccctcgctcaagcgattcttctgcctcatcctcctaggtagctgtgactacaggcgcgcaccgccacgccaagctctttttttttttttttttttttggcagagagggggcgatgctatgttgcccaggctggtctcaaactcctaggctcaagggattctcccacctcggcctcccaaagtgctacgattacaggcataagccaccgcgcccggcctcagacccctgtatttaaggtcggagtgggggagggtgcaagtcccgtgaccacccaaccacacggaccacagaggcttgcagtaccgtatggagggtgagcaggtgtaaagccgacttatgaaaggtgtttctttttctctatcaggtcctattctcttggcgtcactttcttgtagtgcctggatctgtctctgtctctccacctgaccccagtctctcagattcggtatctgtccactagatctgtccactagaatcactagatctttcttcctcggagtatgtccctctctcgaggtttttgtctatttgtttctctgagcatctctgccatttatttctgggtttccctctgtctcgattcccctctctctgactctagtctcactgtgtctctgtctttttggggtctttgtctctcagtctccatgtctctgggtctctgtctggcttcttgatctctctgcatctcttactcgtttggttctctctgttctgtagtctctcctgtctgtctatctggtctctctctctctctctctctctctctctctctctcatttttagagataggttctgctttgtcccaggctggggtgcagtggcgcagtcatagttcaccgcagcctacaactcctgggctcaagcgatcctcctgcctcagcctcccgagtagctgggattacaggcacgcggcactgcgcttggacaatttttgtattttttttttctctagagacagggatttgctatgttgcccagacttgtctcgaactcctgggcttaagcaatcctcccctcggcctccccaagtgctgggattacaggcgtgagccacctatctggttcctctatactagtctctctgtctctgtcgcccgtttgggtctatctccgttcttggggcctccccgtggctctatctggtttctgtctctgtatctggtttctgtctgtctgtgcctctgcctctctggctccgtgtcctggtgtatctctctctcagtagtctctgctatcactcggtctctctccctgtctccgggtctctgtctttctggtttccctctacctgtctacctgtctggccacctgtttgggtccccgtcggtccaagccccccgcgctgtcgccctcgggcccctcaccgcgtcgcggctgctctcagtgctgctgccttctcccacttcttcttcctctgcctgctgctcagctcccccgcggctcgaaggttccgccaggacttcggatgcctcctgttcccgggactcctcgggatggccctggggctggacctccacgtcgcattccgggaccagcggcggcggggtcccctcctcggggctgcttcgcgtccccatggccgctgggactcctgcggggtgggcgggaccagaagctccgggggcggggcctaggacggctgagcgccgctcgcgtctgctccggggcgcggagacccccccccaaggaggcggggcctaagagttcaaaggatggaactgagcgttacggaggcgtgtcctgaagtttccagaggcggggcttgatggctccaaggcgacacgccaccggagacgggaccggaatttgagtccgggtcgtagcacgccccctactgacctcttcgaccccgcctcccctccctcatctctaggtgtcaggccttgtaccctcccagcagccccctacaatctcttggattcgcttagagcgacccatcttctccctccgagactcagcagttcggctcccgccccatccttcccggagccccgtagtcttagtcccgaccccactgtgcagggcaaccgtgcccacgccgcctcacccagggatccaggagtcggggctctccttctctgaacaagccaggagtcggagtccttgagattccgaagtccaactgccacctccccacagcctcggccccctcacgagctcaggcttcggcgcgctccgctctgcgcgctgggcacggccgcttctgcctatgagacaggtggcaggggaagagggaggagagaggccgcccggtccccctccccagcagcccggaagtggaggggggacaacaggtccaacagctcccgagggaggagggagccacgggcttgccccacccgtggcctcggcatccggccatcccggccccaccggccccggcccggccccaccctcgtggaactcagcatcgcgacctcccagtctccctcgagcccctcattcctgcccccctggaggagtcttggccacctctgtatgggagcctctctaatgtccagaccttgggagttcagaaaggaaggcaggaatggagatggggacgtctcccctctaatgagcccttcagaagggccctgaccggtttggggagctggacaaggggaaggggtgccctgaactgagtcagacacctgcccagagactgagggaagtgtaccgccacccccccacaactttgctatggggtggagggcagaggttaaaggtctcagccagaccctttcctctctgggcgaaaacaggaaaatgaaaacaggaaaataactggtatatgaaaagggatgattagaagtcaagagctgtgtgaaacactttatacccagtcatttaatttcaccctcaaagctgtccagcgagaaagtgattactacctccatttctttttttttagtagagactgggtttctccaggttgcccaggctgatcttgaactcctgggctcaaacaacctgcctgcctcagcctcccaaagtgttgagattacaggcgtgagccaccgctcctggcctactatctccattttacacttggggatacaagctgaggaggacaaatgcacccaaggttggctgggcacagaggctcaggcctgtaatcccagcactttgggaagccgaggcaggtggattgcttgagatcaggagttcaaggccagcctgggcaacatggagaaaccccatctctactaaaaatacaaaaattatgccaggcgtggtggcacacacctgtcatctcagctactccagaggctgaggcaggaggatatctcgagcccaggaggtcgaggctgcagtgagtcttgaatgtgccactgcactccagcctgggcgacagagtaagaccccatctcagaaaaaaaaaaaaaaatgtagccaacatctacacatgttgtaagtggtaaaatgcaggcttcattctctcaaaagtccatgttcttaaccattgcgtatactgtcactacaagccaggaagtacccaaaagatcattctaaatgatagtaactttaatggtgaacactgataggccatgtgccaggcactcacacacattgactcatcagagcatcacaacaccccattattattccttccattttagagataagaaaactgaggcctagagaagtgaagtaacttaccccagggctaagtgggaagtggctcaaaagcaagccggtgttctaatccaaggtgatgagaagacctgccccagatagctgtgtttgtttttgatc[132 bp omitted]aaccctgtctctactaaaaatatgaaaaaattagccgggcatggtggcacgcgcctgtagtcccagctacttgggaagctgatgcaggagaatcgcttgaacccgggaggcagaggttgcagtgagccgagatcgtgccactgcactccagcctgggcaatggagggagactccatctcaaaaaaaaaaagaaaagaaaaagaaaacaaatcttgcaggctccctggcctctccataggaccagaaccccacccctttcggcccagaaacccaattggttcccccagaaaataggtagaagtcagactcacgttaaaaaaagttttatttagggagctccagggaatgcggtgggaaaggagaggtgcagtgtcattgccgccctctcctcccacctagtgcattaatagtggatgggagcatctgacagaagtgagatcaggcagtgggtgtctgcaccccacagcgcatgttggctggaacagcaaagtctgaaaggaagaaatcaaggttaaaactaaggggcctaggtagagttccaggccccactggagacccagaaatcctaggaacctttcctcttcaggaaactagagttttggtcctgagcccactccttccctcagacccaggagtccagtaccccagcccctcctccctcagacccaggagtccagacccccagcccctcttccctcagacccaggagcccagacccccagcccctcctccctcagacccaggagtccagtcccccagcccttccttcctcagacccaggagtccagtcccccagcccctcctccctcagacccaggagtccagtcccccagcccctcctccctcagactcaggagttcagacccccagcccctcctccctcagacccaggagtccaggcccccagcccctcctccctcagacccaggagcccaggtccccagtccctcctccctcagacccaggagtccaggcccccagctcctcctcccccagtccctcctccctcagacccaggagcccaggtccccagtccctcctccctcagatccaggagtccaggcccccagttcctcctccctcagacccaggagtccaggcccccagttcttcctccctcagacccaggagcccaggcccccagcccagcccctcctccttcagacccaggagtccaggcccccagctcctcctccctcagacccaggaccccaggcccccagcccctcctccctcagactcaggagcccaggcccccagcccagcccctactccctcagagccaggagtccaggcccccagcccctactgcctcagacccaggagtccagtcccccagcccctcctcccttagacccaggagtccaggcccccagcctctcctccctcagacccaggagtccaggcccccagcccctcctccctcagacccaggagtccaggcccccagcccctcctctctcagacccaggagtccaagaccccagcccctcctctctcagacccagaagtccaggtccccagctgctcacctatctgctgaggtttaggcaagttcaggttgcccatgattttgacaaactcctcacagctgagggtgagccgagggttcagagtcctctcctcctccacggtggacactgtgaaccctaggggccaagggaggggaaggaaagtcaaggagtctagtgcctcaggcctctcagaactacattccccaggaggccttgggtgcctctctggcaggggctcttcccagaatattcctaaaattgctttccctcctccatggacactatgggaaatttagttttcccccagttccctaagctccacaagtaaggcccaggaaaacccatgccctgcagaattctaggcatctggcagtcacatagtttctacatccacacacagcaggctcaagcactttatctctttttttttttttttttttgagacaggggcttgctgtgtcacccaggctggaatatagtggtacaatcatagctcactgcagcctcaacctcccaggctcaagcaatccttctaccacagcctcccaagtagctggcagcatgccaccatgcctggctaatttcttgtattttgtagaggcagggttttgccatgttactccagctggtctcgaactcactcctgggctcaaatgagcctcctgccttggcctcccaaagtgctaggattacaagtgtgagcccccttgcccagcctcaaacacttaattttttttggccagagaaatttctgagactggtcgtcttcatgccctacaaggattacagagatttacactccactttcaaagttatgtacgccccacacctcttccaggaagccctcaccatggtaatcgtgagcagggtagatcagacagtctcctggaagtgtgaagatcttttcatggaccgagtggtacaaggtcttggcacagcctggggaaggaaagatcagaggtcagtggatcaacaggacagaagactctaaccccttccttcaagaaaagggtaggaggataaaatcactatagctaaaccctctccttcgtgtcctgccaatatccctttgtctaagtagagaacagggaaaggcattctaggcagatggaacagcatatacaaagaattgaggaatgtcaagaaattcagcatggctgtaaatagggttggaatgacaccgtgaagcaccaaagagtgtcatttgtgaccttggctgtcacccaggggatgtcaagtaagggttctgaacaaggaaggtggactagaaggtaagaaactgaagacaaagccaggtgcagtggctcatgcctgtaatcctagcactttgggaggctgaggtgggtggactacctgaggtcaggagttcgagaccagcctggccaacatgacaaaaccctgtctctactaaaaatacaaaaattagccaggcatggtgacccatgcctgtaatcccagctatttgggaggctgaggcaggagaattgcttgaacccaggaggcggaggttgcagtgagccaagatcacaccactgccctccagcct[144 bp omitted]aaaccctgtctctactaaaaatacaaaaaaattagcctggcgtgatggcgggcgcctgtagtcccagctactcgggaggctgaggcag[136 bp omitted]atgaggcccaggaggagagtgtgaagccatggtccccacaagcagctctgagtcctaagtagggggcaaacctctattccaccttgcatttcggcctaaatccttcagcttcctgactgtactgtgaatggataaatgggagattgggagccttggagagaaaaagacagagactgagatgcagagataaggagagagggaagagggaggaagaggcctggggatgtggcttccacggccatctcatcatggcttctgtctttccctctcatccagcctcacctctccccacaagacagctaaattccaggcctagtgttaaccccacattcacacacatgctcaaaggatggcccaaccctgagattctgaaactatactcgctttctacagggaagctcctaaatctaactgcccctagcagctagactccaaatggatcattcattgctccctggcaattaaaccgctggctttaacaacttctttttttatcttttttttttttttttttgagatgaagtctcactctgtcacccaggctggagtgcagtggcgcaatcttggctcactgcaacctccgcctcctgggttcaagtaaatctctgcctc[134 bp omitted]gcctcccaaagtgctgggattataggcgtgagccaccatgcccagccctttgttttttttttttttttagctatatttgtttcttagagagggagtctcactatgttgcccaagctgggctcaaataggtaactaacacacccctgaatctaactgtcccccaacagctaagcccctgaatctaactcttcccatactctagcatgggggtccttaaccctgggtaccggtccgtggtctgttaggaactgggctgtgcagaaggtggtgagcggtgggtgagtgagcaaagcttcatctgtagttacagccactccccatcactcccgttaccacctgagctctgcctcctgtcagatccgcagcagcattagattctcataggagcacaaactctattgcgaactgcacatgcgagggatctaggttgcgttctccttatgagaatctaatgcctgatgatctgtcactatcttccgtctctcccagatgtgaccatctagttgcaggaaaacaagttcagggctcccactgattctacatgatggtgagttacataattatttcattatctattgcaatgtaataataaagtgcacaataaatgtaatgcatttgaatccccgaaactatgccctgccatggtccatggaaaaattgtcttccacgaaaccggtccctggtgccaaaaaggttggggaccactgttctagcaggtaaactccttgaatttaatactgaagccccctaaaagtctaatgtccatccattcattcttgtaacagatacttcaacacttgacacacacgtaactatatgaagatcttgggctggataaaggagctggtcaccttgctggaagtctgtccgcccacacccacggatcaacagggcatctccagtgaaggccatgctgtggtcattcaggacgaaggtgacacagcctggggtgtggccagggctggccctggtctccaacgcctggcaggggtggaagagtacagagatagtcaccaagaagccttctagatgaaactggcccccaaagccccaccctaccccagggtcttatctagataaacattttggtaaaaaatgtagattcccaggctgtaatcttatattatcagagtaaactccaagtggattaaagatttaaatgcatgaaaaataaaaccgcaaagctgtgacacacaacaacaaaaatacaaataatatctgacctctggttaggaaggtgatatggtttggctgtgtccccacccaaatctcatcttgaattgtagctcccataatcctcatatgtcatgggagggaccaggcaggaggtaattgaataatgggggcaggtttttcccatgctgtctcgtgatgatgaataagtctcacgagatctgatggttttataaagggcagttcccctgcacactctctcttgcctgctgccatgtaagacaggtctttgctcctccttcgccttccaccatgattgtgaggcctccccagccatgtggaactatgagtccattaaacctctttttctttataaatgacccagtcttagggatgtctttattagcagcatgagaaaagactaatacagtaaattggtaccagtaaagtggggtgctgctataaggagatgtgaaaatgtgactttggaactgggtaacaagcagaggtttgaacagtttggaaggctcagaagaagacagaaaaatgtgggaaagtttggaacttcctagagacttgttgagtggctttgaccaatatgccgagagtgatatgaacaatgaagtccaggctgacatggtcttacatggagatgaggaactttttgggaactggggtaaaggtcacttttgttatgtgttagcaaagagactggcagcattttgcccctgccctagagatctgtggaactttgaacttgagagagatgacttagggtacctagtagaagaaatttctcagcaggaaagcattcaagaggtgacttgagtgctgttaaaagcattcaagaggtgacttgagtgctgttaaaagcattcacttcagttttatgtattcacaatgatatggtttggaattggaacctatgtttaaaagggaaatagagcataaatgtttggaaaatttgcagcctgacaatgtgatagaaaaaaaaacccattttctgaggaaaaattcaagcctgctgcagaaatttgtataagtaacgaggagccaaatgttaatcaccaagacaatgggaaaaatgtctccagggcatgtcagaggttttcacagcagcctctcccaacacaggtccaaaggactaggagaaaaaatggtttcatgggcagggcccatggccttgctgttttgtgcagtctcaggacttggtgccctgcatcccagtcggggctaaaaggggccaagtacagctcaggccattgcttcagagggtgcaagccccaagccttggtggcttacacgtggtgctgggcctgctggtgaacagaagtcaagaacagaggtttgggagcctccagctagatttgagaggctgtatggaaatgcctggatgtccaggcagaggtgtgctgcaggggtgaagccttcatagggaacctctgctaggacagtgcagaagggaaatgtggagtgggagcccccacagagagttcccactggggcactgcccctagtggagctgtgagaagagggccatcgccctccagaacccagagtgttagatccaccgagagcttgcaccatgtgcctggaaaagccacagatactccacaccagcccgtgaaagcagccaggagtggggctgtaccctgcaaagccagaggggcagagctgcccaagaccatgggaacccacctcttgcatcagcatgacctggatttgagacatggagtaaaagatctttttggagctttaagatttgactgccccactggatttaggacttgcacggagcctgcagccccttcattttggccaatttcttccatttagaatggatgtatttacccaatccctggatcccactgtatctatgaaataactaaacttgcttttgattttacaggcccataggtgggagggacttgccttgtctcagatgagactttattttgttgttgatttttttttttttttggagacagaatctcactctgtcacccaggctgggatggagtggtgcaatcttggctcactgcaacctctgcttcccaggttcaaccaattcttgtgcctcagcctcccgagtagttgagactacaggcatgtgccaccatgcctgcctaatttttgtatttttagtatagacagggttttattattttgggaaagctggtcttgaactcctgacctcagctgatctgcctgccttggcctcccaaagtgctgagataacaggtgtgagccaccatgcccggcctcagatgagactttggactgtggacttttgagttaatagtgaaatgagttgagactttgggggactgttgggaaggtatgattggttttgaaatgtgaggacatgagatttgggagcgaccaaagtggaatgatatggtttggctgtgtccccacccaaatctcatcttgaattatagctcccataatccccatgggttgtgggagggagccggtgggaggtaattgaatcatgggggtgggtttttcccatgctattctcatgatagtgaataagtctcacaagatctgatgatcttacaaacggcagttcccctgcacacactttcttgcctgtcgccatgtaagccatgccttcactcctgttttgccttccaccatgattgggaggcctcccaagccaggtggaactgtgagcccactaaacccctttttctttataaatgacccagtcttgggtatgtcttttttttttttttttttttgagacagtcttgctctgtcacccaggctgcagtgcagtggtgcaatcttggctcactgcaacctctgcctccccagttcaagcaattctcctgcctcagcctcctgagtagctgggattacaggcatgtaccaccacacctggctaatttttatatttttagtagagatggggattcacc[138 bp omitted]acagaagggatattcaaatgtgatacctaaagtgataaatcattaaggaaaagatcagtcagaaggttctgaatggcagcaacaccataaacaaaatctaaagagaaccaatatgctgggaaaatatatttgtaacatatacataccacacagtggtcaatatacttaatatacaaacagatcttgcaaaccaattttaaaaaggtaagcacactaatataaaaatggaatacccaacagtcattaaaagcaataccgttgaaataaaattcaatgttttac[135 bp omitted]accccatctctactaaaaatacaaaaattagccaggcatggtggcacatgcttgtaatcccagctacttgggaggatgaggcaggagaattgctttaacccgggaggcggaggttgcagtgagccaagattgcaccatcacactccagcctggatgacaagagcaaaactccgccttaaaaaaaaaaaaaaaaaaagacagtgaaaaggtagccctcagagtggaaaatgatatttacaaacataaacagtagtccttccttatccgcaggggatacctccaagaacccagtggatatctgaaacctcagatagtacaaaccctataaatactgttttgttttgttttgttttggacggagtctggctctgtcacccagactggagtgcaatggcatgatcctggctcactgcaacctccccctcctgggttcaagtgattctcctgcctcagcctctcaagtagctagggttacaggtgcccaccaccatgcccagataatttttgtattttttagtagagacagggtttcaccatgtt[136 bp omitted]aagtgattaacgaatgggtaacatactcctatacagcacagatacactggacgtagggataattcatgtcctgagtgggatggtgtgagattttatcatgctactcagaacgatgtacaatttaaaacttactaattgtttatctctggaattttccattgaatatcttcacgctatggttgaccacagataactaaaaccacagaaagtgaaaccacaggtaaaggagttgtactggatccaacaaagttcttggatccggaatatataaagatcatctacaaatcaaaattactgggcagtttctactaaagctaaatctacacataccctgtggctcaacccttggtatacatgtggtccttgacttaagatggtctgacttatgatttttttttttttaaccagagtctcactctgtcacccaggctggagtgcagtggtgcgatctcggctcactgcaacctccgcctcccgggttcaagcgattctcctgcctcagcctcctgagtagctgggattacaggcactcaccatcacacctggctaatttttgtctttttagtagagatggggtttcaccacattggccaggctggtctcaaactcctgacctcaaatgatccgcctgcctcatcctcccaaaatgctgggattacaggtgtgagtcagccaccatgcctggcttttttttctttctttttttcttttttttttttttttttgagatagagtctctctctgtcgcccaggctgcggagtgcagtggcatgatctcggctcactgcaacctcggcctcctgggttgaagtgattcttgtgtctcagccttctgagtagctgggataacaggcacgcatcactgtgtctagctaatttttgtactgttatttagtagagacgaggtttcatcatgttgaccaggctggtcttgaactcctggcatcaagcaatctgcccacactagcctcccaaagtgttgggattacaggtgtgatgtgcccgatgactaacaatttattgactttacaataatgtgaaagtgatacattttatttctttttttcatttgtctttttttttcttcagtaaagatgggctctcactatgttgaccagcctggtcttgaactcctggcctcaagcaatcctcccatctcagcctctcaatgtgctgggattacaggcatgagccactgcaccaagccaaaagtgatacactttcaatagaaatcatattccatgcacccatacagccattctgtttttcactttcaattcagtattcaataaattacatgagatattcaacactcttgtataaaatacaaggctttgtgttagatgagtttgcccaactgtaggctaatgtaaatgttctgaccactttaaggtaaagta[144 bp omitted]gaaaccccatccatactaaaaatacaaaaattagccgaagccaggcacggtggctcgcctaatcgcgacactttgggaggccaaggcaggtggatgacctgaggtcaggagttcaagatcagcctcgccaacatggtgaaaccccatctccacaaaacatacaaatattagtcaggcgtggtggtgatgtctgtaatcccagctactcgggaggctgaggcaggagaattgcttgaacccaggaagcggaggctgcagtgagctgagatcacgccactgcactccaccctgggtgacagagtgagactccgcctcaaaaaaaaaaaaaaaattagccaagcatgccaagcgtggtggcacatgcctatagtcccagctactggggaggctgaggcagtagaattgcttgaacttgggaggcagaggttacagtgagcagagatcatgccactgcattccagcctgagtgacagagcaacactccgtctcaaaaaaaaaaaacaaaaaacaaaagtcaatatcctcagcttgggtgacagagcgagactgtctcaaaaaaaaaagtcaatatcctggggcaaaaggatatgaaactgttctagatccaaaaagatttttgataaataaaaaataataaataaataataaaaaagaaaacaaaacaaaaagaaaagaaggaaaaagaaaacacaaacacacacacaaaagagactaaatagacataatggccaaacactaagctcaattgtatcctggttcctaaaaacagccgtaggctgggcaccgtggctcacacctataattacagcactttgagtcaccgagaggggaagatcatttgagcccaggagattgagaccagcctgggcaacatggtgagatcctatctctaccaaaaaaagaaagaaaaaagaaaaaaaaagctgtaaaaattattcctcgggtaattggagacatctgaacacagctgaatatttaataatgatataaagttactgcatattggccggg[177 bp omitted]gctgaggcag[137 bp omitted]cgtgacaaaggttttgtaaaagaggaagtctcaaagtatagcctagagaaccctgacattctgcaaaatcaaaacgatttttggactttttgcccattttcactcgcattccccaaaaacatttgggggagaggggcgcggttctaaaagtttcatgac[132 bp omitted]gcaacctctacctcctgggtgttcaagtgattctcatgcttcagcctcctgagtagctgggattacaggagcgtgccaccatgcccggttaatttttgtatttttagtagggacggggtttcatcatgttggccaggctgatctcaaactcctgacctcgggtgatccgcacacctcggcttcccaaagtgccaggattacaggcgtgagccaccgcgcccggcctgtgcttgtgtattgttatattttgtactattatttcaatgtagattttaaaaaattcaaaataagaaattgtgggtggggaacatataacatcttgacctaaagcagccttcattgtccctgaaacttgtcgagtgatttccgcaacagcccagcctgcctaaccccaaattctttcaacaaattcattcttcccttccatgatgcatcatgtctgtgacacatccccagagcttttctttcatctgttgcctgcagcagctaaacctgaaactacccccatcaaagaaacataacccagaaggaatcctgtaaagcattcagcttgctggccttggagttcccacggcctacactgccccctggtggcaagtaagctctcagcttcttttccatttggttcccaagttctttcccttcattactcaaaactatagtaaacacctcttatctgcctgggatacatttcaagacccggagtggatgcctaaaaccgcagatagtacagaaccctacacactatgctttttcctatacatacgcacctatgatagagtttaatttataaattaggcacattaataaatcaataataactaataataaaatagaacaattacagcaaggcatgatggtgcacgtctgtaggcccagctacttgggaggctgaggcgggaggatcaccttagccagggttcaataccagcctggacaacatagcgagacccccacccaaaaaaaaaaaaaaaagaataggtcggacacagcagctcaaacctgtaatcttagcactttgggaggtcaaggcaggtggatcacttgaggtcaggagttcgagaccagcctggccaacatggtgaaaccccatcgctactaaaaatcttttaaaaatcaattagctgggtgtggtggcactcgcctgtaaatccagctactgctactcgggaggctgaggcaagagaatcgcttgaacccaggaggcagaggttgcagtaaaccaagattgtgccactgtacgccagcctgggcaacagagtgagactccatctcaaaagaaaaaaagatgaagtgatggatggttagagatgtacactgtaaaaaaaaattttaagcctggtgcagtggctcactctaatcccagcactttgggaggccaaggagggaggattgcctgagcccaggaggtcgaggccagcctgggcaatgtggcaaaactctgtctttacaaaaaacacaaaaactagccaggagtggtggtgcacacctgtagttccagctatttggaagcctgaggcaggaggatcgcttgagccaggaggttgaggctgcagtgagctatgattgcaccactgcactccagcctggatgacaaagtgagaccctgtctcaaaaaaaaaaaaaaattttttttcagcttttctctatgcttgaaatttttcataataaaatgttggaagaaaaattactcgtttcacaatgttaaaaggaggaagtattgaaacccacacttgagccacataagaatcaatggtggagcttttaaaacatgccaattccttgtgtccacccagaacaattaaatcagactctctgattctaagggacctgggggatcagtgttttcagcagtacttctctaagccagcatatttaacagcaaacctaactttctgattcggccaccctgtggcagctaagatgttcacttctcaatcagtttattaaaaaaagaaaacttgggccaggtgcggtggctcactcctgtaatccctgcattttgggaggctgaggcacgcagatcacttgaggccaggtgctcacgaccagcctggcagtatggcgaaaccccatctctaataaaaacataaaatttagccagatgtggtggtgcgcacctgtaatcccagctactggagaggctgaggcagaaggatcaccgaaaggcggaggttgcagtgagccgagactgcgccactgcactctagcctgggtgacagagtgaggctctgtctcagaaaaaaaagaattactcctgttttggcgatccactgccttgtagcgtcatcatgtattaaacagtcccctgctgtgtactttgtcccctgccctacacccctgctgtcttttgtgcacatgagcaagggtgtctctgggcttcacacctagaaggggaacctctgggttggagatcctgaaggcagccagctaatccttgaaacagcctcaagaggaaggtgctgtgataaaccctgtgttttagcgcagggaactgaggctcccagagggaggcagagattgcagtgagccaagattgtgccactgcactccaacctgggggacagagtgagactctgtctctaaaaaaaaaaaaaagaaagaaagaaaactcattctacaatgaaaccacttaaatttgtcccatcttttatgtaagatgaacaaccagttcaagaaactgggagtttctatgaaaattaaacatttgtcgactcagtgacccagaaaatccagtccttagaattcatgacaatgttccctaagatattagcagaagaatcttcatagcagcattattcgtggtagccaaaaactgaataatcagaaggaaaatagggtgtagtggctcatgcctgtaattcactttgtactttgggaggctgaggcaaggaggatcgcttgagcctaggagccaccacaacctgcccattttgtagggcaaaaattatggccagtggaccaaatttggcctgccatcagtttttgtaaggcctgtaagctaagaatcattttaactttttttcacattgaaaactatcaaagtaacatgtaaaaactagatggggctcacacctgtaatcccaacactttgggaggccgaggcaggagggttgcttgaggcctggagtttgagaccaatctgagcaacacagcaagactcagtctctacaaaaaattgtttaaaaattagctgggcatggtggcacatgcccatagtcccagctactcaggaggctgcggtaggaggatcacttgagcccaggagttggaggctgcaatgagctatgctcacgccagtgcataccagcttgggcaatagaacaagagcctgtctcaaacaaatttaaaaaaaaacctatatgaaatccaaattttattttttattttatttatttattttttttgaaatggagttttgctcttgtcactcatgctggagtgcaatggcaccatctgggctcactgcaacctccacctcccgggggaggttcaagcgattcccctgcctcagcctcctgagtagctgggaatacaggcacaccccaccacgcccagcttattttgtatttttagtagagatggggtttcaccatgttggtcaggctggtctcgaactcctgacctcaggtgatctacccacctcagcttcccaaagtgctgggattacaggcatgagcctgacctaaaatccaaatgtagaggccacaaataaagtcttattagaacacagccatgcctattcatttatgcagtgtctgtggctgctttcatgccacaataagagagctgagtagctgtcacagagaccctactacctgtaaaaactgaaaatatttactatctggtccttcacagaaaaaggtggccaactgctgctctatagcaataagaaggaaagaactccaagtataaaccaacatcatgtagagtggaaaaaaggccagacacaaaagagtacactgtataagtcctgtttataatgtcagaacaggcaaaaccggcctgtggttaaatgcatcagaagaatggtgccttaggagggcggtcattggccagaaagggaggcaaggaagacttctggggtgatgggcaagttctgtatcgggatctgggtaagtactcatacacatgtataatatgtggactcctttcattccatgaatgttaacaactcggttttgtttgtttgtttgtttgttgagatggaatctcgctttgtcacccaggctggagtgcagtggtgcgatcttggctcactgcaacctctgcctcccggattcaagcaattctcctcctgcctcctcagcctcctgagtagctgggattacaggtgcctcaccaccataccgcttaatttttgtatttttagtagagacagggtttcaccatgttggccaggctgatctcgaacttctgacctcaagtgatccgcccacctcagcctctcaacgtactggaattacaggcatgagccaccacacccaggctaacaattcatttttttaaagtagaaggaaaaataaaggagagaaaaatggacccccatctccaaaatctcagacaagccagccatggtggctcacgcctataatcccagcactttggggaggtcaaggtgtgcagatcacctgaggtcaggagtttgagaccagcctggccaacatggtgaaaccctatctctactaaaaatacaaaaattagccagacatggtggcacatgcctggaatcccagctatttgggaggctgagacagcagaatcgcttgcgctcaggaggcagaggctgcagtgaactgagagcttgccattgcactccagcctgggtgacagagcaagactgtctcaaaaaaataaataaaaatgtgcctgggcgcagtggctcatgcctgtaatcccaacactttgggaggccagggcgcgcggatcacctgagatagggagttggagaccagcctgaccaatacggagaaaccccgtctctactaaaaatacaaaattagctaggcatggtggcgcatgcctgtaatcccagctactcgggaggctgaggttgcgctaagctgagatagcgccattgcactccagcctgcgcaacaagagcaaaactccatctcaaataaataaataaataaataaaacaaaaaaatttgctgggcttggtggcgcacgcctgtaatccctgctatttgggaggctgaaacaagagaatcacttgaacccgggaggtggaggttgcagtaaaccaagatcgcaccactgcactctagcttgggcaacaaagtgagaccctgtctcaaattaaaaaaaaaaaaaaaaaaaagttgcctaaggctgaggggggaaaagggaaggataggggtgatggctaaggggtgtggggtctttttggagtaatggaaacattttccaattaatggtagtaatggatgtacaactctgaatatactaaaagtcattgaattgtgcactcgaaatagataaattatatggtatgtgggttatatcaataaagctattaagcctgggcaacatagtgagattacagctcaacaaaaaattaaaaaattagccaggtatggtggcaggtgcttgtagtcccagctacttaggaggctgaggcatgaggatcacctgagcccagaaggtcaaggctgcagtaagctatgatcccaccattgcactccagcctgggtgacagagcaagaccttttctcaaaaacaaacaaacaaacaacaacaacaaaaaagggtgggtgcagtggctcatgcctgtaatcccagcactttcagaagccctgtaatcctagcactttaggaggccaaggtaggaggatcacttgtgcccagtagttcaagaccagcctgggcaacataacaaaaccctgtctctacaagaacatacacaaatcagccaggcgtgctggtgcatgcctgtggtcccagctaccagggaggctaaggtgggaggatcacctgagcctgggaggtcaaggctgactgcactccagcctaggtgacagagacccagtctcaaataaaaaaaaaaaagaaagaaagaaagaaagaaaaaaaaaaaacactgaagctaaatctaccatagctaaacccttcgttcatttcaagacatgtttgttagcacctattatgtacaatgtacatacatgtacaatgcatttttgcctgcttccagagaaaggcttgaaataaagcttctgtaaccattgtagctgaactctcttcccacacacagccctcatttcctctaaacactctgactcaaatgaactgtccctatttggcaaaactctctaacctggaggctgtcttctgtcacctgacattctgtccccaaagtcagccaaactttattatacatctttagcaattgatcagaagaatgccctgccagctgtttccctctctctgagggcaactcccctggccctccctccttcggcctggttgcaattctggccggaaacccgctggtgcctgtggcaaataaagtgaggaaggcaggaacctttagacttcccagtgtgaggcaacggcagggctaggactagggtgaggctgttggtgcaagatttaaggaggcgctcactcacaggtgcggaccctgcacttacaggaccctgagagcgagtgcctccttaaatgttgcactccagggtcctcaccgtccttttcctagtcctgggctccgggttctaagcacccagatgctccttcctcaaacggaggtttccgcaagacaggactgggtctctttccttctcagccctgccctcagaattccagcccctaatcaacttttatggagatgcatgccaggccaaagggctgcccctaagctttaggaaggaaactccttaaatgctgttgacttaggagttccgccagtgccccacctgcccagagcctcttgccccagtgccccacctgggtttatggtgcccccctcccagaaatatgagctcaggggtcagaaacccaggtcctgaggtccctcctccccaaggactcaggatcccaggcccccagtcccctcttcccttaagtttaagaagtccaggccaccaccctcttggggacccagcacccaactcacgaagcgcccgaagcggatggagtctccatcctcaatgtgtaagtcagcctgggccccactaaggcgggagatgacagactggcagccagggaggagggaacggagcagccccgagcctgtaatgtggtccgcgtggcagtgggtattcactgggagagagaggagggacaggtccggagggtacagaaaggacctgggagtcccagcccagatccttctccctcagactcaggagttctgggccccagcttcccattccactgacgctgcagcccagccccgctgggatccatgagtttggtccccggactgaccagcatagagcagccgcagccccagctccttgatcagctgggcatcccgaggcgctgtttccaggactgggtcgatcagaacggcctcccgggactctctgtcacccagcaggtacgtgaaggtgcagctcacaggctcgaacatctgggaacgggggacccaggtgagggcgcagaaccggacttccacccactggaggccaagtagtccagactgaccctatcctcttcctaagatccagaagcagaaaccccagcccactctttccccgggagtcgggagtccggagccccactaccttcccctatcagaacaaaagagttccaacttcctaacatcccaaaatcagggtccccagcacgttctttcatagaggacccaggggtctggccccaagcccagaggcccccagaccactcacctttaaaggacccaagagtccagccctaaacctccaccccgctttccgcaagatgcaggcgtgggtccccccggatctctccctattaagagaccccggagttccgtccttgctgccgcctagtgcccagcagtcccctcctaggtccagccacccgcacctgccgcaggaggatgggggctccagacccgccgcgctggctcagctgccgccgggcgaccctcagtacagcctccgccatcgcgcccactgcggggtcaggaatgagcggaggccgagcgcctgcaggagccgggcgctacggcactgaccccgggaagggcggggcgggggcggagcacgccttaaaggggccacggacgcctggggcagagggcgggggaccgccgagcgggactggggcgagggcgagaccgaggaaagccagagtgcaatgcctggacgctttgagacccagaaaaaacagagaacagggagacactcaaagtgcgagggacagacgctcagagacacacagacatactcatgtaggaacagagatagggagagaagtagaaacccagggagaggccccagtacactcatagcctcggggccgttttttttcctttttcttttgttttattttgagacagagtctcgctctgtcacgcaggcttgagtgcagtgactcgatctcagcttactacagccttaaactcccgggttcaagcgatcctccaacctcagcctcccgagtagctgggactatggcacgttgccaccacacccgacattttatatatatatatttatatctatatatatatttatatacatatatatatatacacacacacacacacatacatgtatataaaatttgttttttgcagagacggagttctcactatgttgcccaggctgatctcgaactcctgagctcaagcgttcctcccaccttgtcctcccaaagtgctgggattacagacgtgagccaccgcgtcccgtggggccgttttctagcaggtggtaggatagtcatggttagaaaaagatgttcggttccgggaggcagaggttgcagtgagtagagatgacgccactgcactccagcctgggcgacagagggagactctgtctcaaaaaaaaaagatattcgttcggttccaggtcattaatatcttgagggacttttgagtgggtgcctggttaccagaacaacacttgatcccattaaagttcatccagaaattgcataagcattttatcaggaatgtttctctctttccaggaagaaatcttaaaaaaaaaaaaaaagataattttgcattatctcttgaataatcagattggggattattcatcttctgttggggtgtgaacctctgaaaagagcttgtgttcatttacaccaaggacctggggctgaaaaactgtagtctcaagtcatgagctgtcagaaagtctgctctttgtaatcgtagcagtagtgagaataggacatcccactctcatctggaggatctatgtcactttgtgacatcagagcagccttgatttccagcctaggggcagagcttttttttttttttttaattgttagaattttttttgtagaaacaggggtcttgctatgttgcctaggctggtctccagctcctggcctcaaatggtcctcccacctgggcctcccaaaatgctgggattacaggtatgaaccactgagttatcctgtcccacagcttctgaggaggggtttcctgcaacaacatttatcttaattctggagtttccagggaatggtccctggagctattttcagagcagcccctgtgtgaatgcctttacacagagaaggcctgcttttccttaagcctatcaaattgcttcattaaaattttatgtggccggctgggcgcggtggctcatgcctgtaatcccagcactttgggaggctgaggcgggcggatcacgaggtcaggagttcaagaccagcctgaccaacatggtgaaacaccatctctactaaaaatataaaaattagctgggtgtggtggtgcacacctgttatcccagctactcaggaggctgaggcaggagaattgcctgaactcgggaggtggaggttgcagtgagctgagatcgtgccactgcattccagcctgggtgatggagactccatctcaaaaaaaaaaaaaaaaaaaaaaaaaaagcatatggctgagctcatgcacaggcactttgagcactttgggaggcctaggtgggcagatcacttgaggtcaagagtttgagacagcctggccaacatggtaaaaccccatctctactgaaaaaaataaaataaaatacaaaaaaattatctgggcgtggtggggcacgcctgtagacccagctacttgggaagctgaggcatgagaatcatttgaacccaagaggcagaggttgcagagtttgcagtgatccaagattgcacctctgcaa[148 bp omitted]ggtgaaaccccgtctctactcaaaaaaaatacaaaaaattagccgggcatggtggcggatgcctgtagtcccagctactctcgaggctgaggcagaagaatggcgtgaacccgggaggcggagcttgcagtgagccgggatcgtgccactgcactccagcctggacgacagagcgagactccgtctcaaaaaaaaaaaaaattccaggcatgaggtctcatgcatgcctgactcaagctagacaaagctgaggacccagaggtgactcagtctggctggtaggcgagagaggtagggaaagcaggtctgagacacagggaggtgtagggatttggggaactcaggggagggaggagccagggaaaggaagaccctcaggcactccttactgagagggtcccccaaataagaacttctcgcccctggcaccctttcccgttgtttttgcagaatttctagaccatttatgtgtcctttgaagacacaccctaggcagggtttataggctcagctgtgagatgttctaagagttagacttggcttcacccttctcaggtgtaggaccttgggctgaaaacttatcttcttctgggttccagttttcttatctacaaaatgaggttgaaaatagttcaatagcctgacatagcacaggctctcaatgggaactgcccatcattattttgtcactatccttgactccttcctacccttgccacctccacccacttccaggccctgctgagttaaactctctctctttttttttttttttttttttgagatggagtcttgctctgttgcccaggctagagtgcggtggtgcaatctcagctcactgcaacctccgcctcctgggttccagagattcttctgccccagcctcccaagtagctgggattacaggtgcacaccaccacacccagctaatttttgtagttttagtaaagatggggtttcaccatgttggccaggctggtctggaactcctgaccccaagtaatccacctgcctcagcctcccaaagtgctgggattacagggccgagccaccgtgcccagccagatttaacctatcttaaccaggccacttttctgttatcacaccctctgccccattcaaggggcagcaaagcataaatgcaaattgcctggactgcagggccaggctgagggattcaaatcctggctctgatacttcctggctgggatgaccttcccctccacacttcattttcctcctctgtacaaggatgatagtagcacctcctcttaaaacattgctatggggattaaataaattaatgcacataaggacagtttccagtgtataataagtgctagcaattaatactgtaattaatatataacaataccctcactggtcttctggcttctactctgccttcttaaaatcatggttcttgaaaatagctgtggccctagaggttgggcgcggtggctcacacctgaaatcccagcaccatgggaggccgaagtgggcggatcacctgaggtcaggagtttgagaccagcctggccaacatggtgaaactccatctttaccaaaaatacaaaaaaaaaaaaaaaaattagccaggcgtggtgacgggcacctgtaatcccagctactcaggacgttgaagcaggagaatcacttgaacctgggaggtggaggttacagtgggctgatatctcgccactgcacaccagcttgggtgacagagcaagactccgtgcaaaaaaagaaagag[133 bp omitted]ctgggtgttgtggtgaacacctgtaatcccagctacttgggaggctgaagcaggagaatcgcttgaactcgggaggcagaggttgcagtgagccaagattgcgccactgcactccagcctgggggacacagcgagattccatctcaaaaaaaagagagagagagagaccgaagtgtcacttcaaactaatacaatgtgtggagctcatttagatcttaagtcaagcaaatcaagtgtaataaaaagatatttatgagatatgatgtttgacatttagcttcagaatcatttgggaagagtggatggggggtaaatcaaacaatactggtcatgagtgaataattattttaaaaactttttttttaaagatacggggtatcactctgttgcgcaggctggaatgcagtaacacaatcatagctcattgcagacatgaactcctgggtgagtccccactccctacccccgtgaaatagctgggactacaggctgccattaagccagactttttttttttttttttttttttttttaagatggggaggtgtctcactatgttgcctaggctgggatttttgtttgtttgggtttttggtttttttgtttttttgagacggagtctcactctgttgcccaggctggagtgcagtggcttgatcttggctcactgcaacctctgcctcccaggttcaagccatcctcccacctcagcctccggagtagctgagattacaagcgtgtgccaccatgcctgactaatttttgtatttttagtagagacgggttttcaccatg[138 bp omitted]cctctgcctcccagagtgctgggattacaggcatgagacagggagcccggcctaggcactttctagtctaaacactttccattgattatcatatttaatcctaaaaacgctccattttatagatgaggaaacaggcctagaaagagagctagaaagggtcacacggctagaaagtggcacagccgtattccaaaccagttacccaggcaatctggctccagagtccaaataaccccgccaaactcccagggatcgccagaccttgcgggttatcggactgagacccacccatgcagaggacttttatgggcatttcctggtcctttctgcaccaggcaggaaggtgcaccgccactgctcgggaagaatgctaagctgcatgccaccccaggcctggcaccaagagcatgggccagggcacctcgggaccacccaggcttccgagggggaaggtagatgggtgcgtggctgagaatcttgaatcacccaatagcgaggtgtgccaaggcgctgtgcaaataacgtgccttttattgggcactggctctctttgagcccggagtcccgcccccgccctctctcgaagaactggccagactttttgcaaacgccttgaagggtagaattagcagcgagctcttgaaactgcctctggagatggaactcagcggaattctcgaaaagaagagggacattaaaaagacgggtgcatgcactgatttccaagcgcagtttgtccatgttagtcttgtacatgcttgactccagtcagccaccgtaggccccgccaccggcggtgcactttctgtcgatacggtagcttcgcgcttgctcacgaacttgcctgcctggctggcgcacccagcccctccttccattccttcttccccctctctgcagcctctgccagcccgcactgcgcatgctttctgacgccccctttggtccagcgtgggaggaggggatggaaatgaggttgggctaagcagcttgcgcgcgctcccttgcctgccctcccccgacgccggacgcgcgccgggcggggcagctccgctggtccgagggcagtgcagcagcggcgacagcggctgcggccgtggccgtggcgggaggagccggaagccccgcccccggggaggggccgtcctgcaggtgagggcgcaggggttcgggcgcggatattggcttgcaggctgaatgccagaatcaccccgagggagatcggttgtggtccggacgcctagattctggagatgctggagggactgtgcattggtgccagagcctcgggagggtgcatcggtgcctgaatgtctgattccgaggggtgcattgaatcctttacgcttgggactctgagggaaaagtccattaggggtctctggaccgcgacgcatgccaggttccttccgtatcttcctccaggtcccccctctatcctccacggccccatccaagccagggatgaaatttaacggcaagaagggcgcagttgacgcggcgtcaatgaactgagactaagtcaaaagccgggtaaagctaggtcttcgacgtgaagccccgcccactgtgcccataggcccctcccctgggacggtgatgaaagacctgcccactccgctcgaaggcccccgccccctgggtctagtttcagaacaagactttttttgtacagccccgcccattccaggactgcagggtctggtggggaaggtcccgcccactctgcgcataggccccgccggctccgcgcttaagacggccgctgagttagttgtggagactccgcccactctgctgaaagactccaaccctgggtttagatagcgaagggactgcctctggcttgaatttgcatagccccgctcactgtgctcttaggctccgcctccccgctaagcctgcccccgccttagcatcccatacttgcagaccttgctcctaaacagtgtgatccctcattttaggccctccaaccctatccccatcagcctggtcatcaccggcgtcacccccgccccgcgccctgcccctaggttcctgtgccagcaagatgctggagcgaggcgcggagtccgcggccggggctaccgatcctagtcccactggcaaggaaccagtgaccaaagaaggtgagagtgccccgcctgtgagtagggagcattctccaggaacgggggccaaaataatcacattctgggggaatctcagggtgaaaatttgagggccctagggtgatgactatttgggatccccaaaactgccacattctgggaaatcctcccatttggctcagagagagcctcagtgaccatttgctaaggctcaggaaatgagccttacagaagggacgggtcagggatgacatgcgggatgtcagggtgatcactgggaagatactagaaacggataccttggtagctttgaggaagccttagtagctttggggatccaggaaagtaaccctttggagtccctcagaatgacgcctggggggaggggggagcagaaacatgcaatttggggagtctcaatgtgatgcttgaggtgcccaggtacacttggaggagccccacgaatatcaaagtcgtggcggagcctggcctaggcccagggcgttggctgcttcctggagcccaccagccctcctgtcccccagctccccaccagggcccaccgcagaagcccagccagtcagctccagggcccaccgcgtccgcgggctcgcctccccggcctcgccggcggcccccgccccagcgcccgcaccgctgccccgactgtgacaaggccttctcgtacccgtccaagctggccacgcaccgcttagcacacggaggcgcccgaccccacccatgcccagactgccccaaggccttctcctacccctccaagctggcagcccaccgcctcacgcacagcggcgcccgcccgcacccgtgcccacactgcccgaagtcctttggccaccgctccaagctggcggctcacctctggacccacgcacccacccgcccctacccgtgccccgactgccccaagtccttctgctacccttccaagctggcggcccaccgccacacgcaccacgccaccgacgcccgcccctatccttgcccgcattgccccaaggctttctcatttccctccaagctggccgcccatcgcctatgtcacgaccccccaaccgcgcccggcagccaggcgactgcctggcaccgatgctccagctgcggccaggcctttggccagagacgcttactgctccttcatcaacgcagccaccaccaggtggagcacaagggggagagagactgagccctcccttggctcactgtccccttctgccgccagccctagccagtaagaggtgggatttctaagaccgactgtatgagctcgcctcttccagatagctggcagagggcagggcaagggattggccatttatactgggctcgagctcagaagcccgaggaactctttgctcccctgctttggggagatctcaaaccatggacgtggagctgtggtttgacagcgctggctctgcttctccccacacacttacatggcaaaggtaaaaagtctgctactatcgtgggttgatgaggattgtgggcaaacaggctctcttgttaaaagtttaaactggtgtctccactttggccatatgacggtatctaagaaattgaaaatacatacatgcttgtctcaactcttccacttgtaggaatttattctataaactcatgaatgtgaaaaaaaagcatagtgttaagggtgttcactgcagtgcgactgttgtggccaaagactggaagcaactcaagtgcccaagaacaggggaccgactattgaattacagccatggaatggaataggtagccataggaaaaaaggaagcgctatatgtactgatgtggaaaaatctccgatacactaggtgataagagcaagaacaaagggtatataccactgaccatttaaagacattcaaaagcccaagcttcaggctgggtgtggtggttcacgcctataatgccagcactttggttagcttgaggccagttcaagagcagtctgggcaacatagcgagacaccatctctaccaaaaaaaaaaaaaaagctggctgtggtggcatgtaccttagtcccagctacttgggagactgaggaaggtggatcacttgagctggcaggtcaaggctgccatgagctgtgatggtgccactgccttccagtctgggtgacagagcgagaccccatctcaaaaagaaaaacaaaaaaagcccaagattcagacccatccctgacccacttcttacaagttgccaggccttggacaagctttgtcactcctctggattcagatgcctttgttgtaaaatgggtgggttataaggcatttgtaaggggcaagcaacacctcaggcaaagtcagttccccttatggagcctgtttctctcattataaaataaggatgaacaagctaacattggaatgttcttcattccacaaatactaagcacctcctgtgtgctggtccctgcatggggtgttggggacacagcattgaagacagaccttgtctagtgaggaaagtgaacactaattttaaaaagcagcagcagaccaggcagagtggctcaggcctgtaatcccagcactttgggaggctgaggcaggcggataacttgaggtcaggagttcaaaaccagcctggtcagcatggcgaaactccatctctactaaaaatacaaaaactagctggacatggtggcatgcacctgtaatcccagctacttgggaggctgaggtatgagaatcgcttggacgcgggagacgaggttgcagtgagccaaggttgcaccactgcactccagcctgggcgacagagagcctgcctcaaaaaaaaaaaaaaaagcagcagcagccaagtcattcattcatccatgtgtgtatgtatgtagagacagggtctatgttgcccaggctagtctgaacttctggactcccactttggcctcccaaagtgctaggattacaggcatgagccaccatgcccggccccaagtccatttagaagaacaagtaggagagccttggctccccaccccctcaacccagatacaagattacaaagctgtgcagtaatgaaattggtggtggtggcttgaaaacgggccagtggaagacaattgagagctcagaaacagacctgtgcttatgctgacatatgacaaactggacctgtagacctgggagtggcaacctttttctataaagggccaaagagtacagatgtcccctgacttaacaatggtttgatttcaggattctccaactttatgatgggttcatccggatgtagcatcattgtaagtcaaagggcattgggttttttttgttttgttttgttttgttttgttttttagacagggtcttgctctgttgtccaggctggagtgcagtggcacaatcgcagctcattgccctgaattcctgggcgcaagcgatcctcctacctcagcctcccaagtagctgggactacaggcaagcaccaccacacccggcttatttatttttgagatggagtcttgctttgttgtccaggctggaatgcagtggcatgatcgccgctcactgcaacctacctctgcctcctgggctcaagcttctcctacctcagcctcctgagtagctgggatttcaggtgtgcaccaccatgcccagctaatttttgtatttttagtagagatggggtttcaccatgttgaccaggctggtctaactcctgacctcaagtggtccacctgccttggcctcccaaagtgctggaattacagacgtgagtcactgcgcccagcccccagctaaattttttttgtaaatttttttgtagagatggggtctcactatgttgcccaggctggtctcaatctcctagcctcaagtgatcttcctgtcttggcctcccaatgtcctgggattccaggcgtgggccgccaagcccagctgcatctgttatatgtttaagttttgcaggccatacagtgtcttccacaactattccactctgccactgtagcaggaaagcagccacacacattacaatacataaatgaatgagcatggctgtgttccaataaacatttaccaaaacactaggtaggctggattttgcctatgggctatagtttgttgagccttgacatggatgagtggaggatggacagactaatcataaataaggctaagagacatggggaaaaattaagttgaatcccctggtatgtagaagaatgatcccccaaagatatccacatttgaatccccagaacctgtatgttagcttgcatgtagcaaaagggacattgcagatgtgattgagatgggtaagttatcctgattattcagataggcccaatataatcacaaaggtccttatatgggaaagaaggacgcagaagacagagagaggtgatcatgaaagcaaacattcgagtgatgaaaggccccaagtcaaggaattttgcctacaaagggcaaggaaataaattcctccttagagcctccagaaggattgcagccctgctgacacttgattttagcccaataaggctgattttggactactgacctccagaactataataaaattaacttgtgtagtttaaaaccactaagcttatggcaatttgttacagcaacaatgggaaactactgcagatccctacctcacaccatatgcaaaaacaagtttctgggagtttaagatctaaatctgaagagaagaactcaaaaatatttacatggaaataagaagaattatcttagtaactccagaagtagagacagtatccttaagagacaaaagaatgtaaatcatagatgaaaacatgggtaaatgtgaccataaatgaatgtaaagttatgactaggatggatgagatatagtattttaagagtgtgtacctggcatatcctattatacagtggaggttaggaaaggccttgttgaggatgtaatgtctgaactgagatctgaaagttgtggtggaaggagtgagagagtagaaagtgtccatagattggataaagaaaatttggtacatatacaccacggaatactatgcagccataaaatggaatgagatcacatcttttgcagggacatggatggagctggaagccattatcctcagcaaactaacgcaggaacagaaaatcaaacactgcatgttctcactta[131 bp omitted]tggcaaaacccccctctactaaaaaacaaaaattagctgggcgtggtggcaaacgcctgtaatcccagctactcgggaggctgaggcacaagaatcccttgaacccaggaggcagaggttgcagtgagccaagatcatgccactgcactccagcctgggcgacagagtgagactctgcctcagaaaaaaaaaaaagaacacatcaggggaacaacacacactggggcctgtcagggggtgggggtggggggctaggaagagcatcaggaagtatacctaatgcacgctggggttaatactcaggtgatgggatgatctgtgcagcaaaccaccatggcatgtatttacctatgaaacaaaactgcacatcctgcacatgtacccccgaacttaaaataaaagtaggagaaaagaaagtgtccagcctaagggctaggactgagcaggctgctgaactgcactctactcagtaaggcatttcggggaaggttttgggaggggtaagggttctactctgtcctcccaacccagcagtgctgcttgtatccacgtttatgcagagaactgtccggaagaatttctccaaagcaaccacaccagcagcaaaatttcaaagacacatactcatgtgagagggcgttgatctggtccaaccttacttttacagattggggaaatgaggccaggaaagatgagatttattggcaaccaaaccacagggcagtacctgagtctaggtggatcctaggtctcttgatagcctgacacccacccagctgttccttgaacacataatgctcgctcctgcctcggggcctttgcacttgcttttcctctacctggaagggctctctcagatactccttacttctcccaggtccctgcagaggggtaagtcctccaagaggccatccccaatcatcctatctataaactaccaggaccctgccattgctctgtcactcacaatgctctattttccttgctctcacagcatttcccactgtccaaggttgcattgcacgtgcaccatctctctccccctgtacaatgtcaggccaatgagatcggggactactgtttttttcatactgtcttcccagtgtcccccacatggtggctttggtaggcagagtaatggcctcccaaagatgttcacatcccagctgggcacagtggctcacgcctgtaatccagcactttgaatggctgaggcgagtgggtcacctgaagtcaggagttcgagacctgcctggccaacatggcgaaaccccgtctctactaaaaatacaaaaattagctgggcatgatggcaggcgcctggaatcccaggtactcgggtggctaaggcagagaattgcttgaacctgggaggcagaggttgcagtgagccaagaacacaccactgcactccagcctgcgtgatagagcaagactccgtctcaaaaacaaaaaaacagggagattatcccaaatgatctaggtaggcttaatgtaatcacaaagatctcttgttgcccaggctgaagtgcaatggcatgatctcagctcactgcaacctccgccgcccgggttcaagcgattctcctgcctcagcctcccacgtagctgggattacaggcatatgccaccacatccggctcattttgtatttttagtagagatggagtttct[139 bp omitted]cagaagagtcaaggtcagggtgatgggatgtgagaaggactcaacaggccattgcaggcctggaatatagaaggtgaatggaatgtgggtggcttctagaagctggaaaagacaagaaaacagattctcccctcaagcctccagaaggaacgcagccctgcctaccttgatttttagcccaaggatacccattttggacttcagacctccaaacctgtaagatcataaatttctattattttaagccactgagcttgtgataatttgttatagcagtagtacaaaactaacatggtgagttatcggtgggagtgtgaatgagcaaacgaatgagtgaacatgaagtctaaagccacccttagctgggcagtgtggctcaacacctgtaatcccagcactttaggaggccaaggcgggaagactgcttgaggccagaagttcgaggccagcctgggcaacatagtgagagcccatctctacaaaaaatagaaaatttatcaggtgtggtggtacatgcctatagtcccagctgctcaggaggctgaagcaggaggatcgcttgggcccaggagttcgaggctggagtgaacaatgattgcaccactgcacttcagcctgggcaacagagcaagaccctgtctctaataataataataataataataataataataataataataaaccaccctcatcttaaagatgcaaaaacaaaggtccagaaagagacaggagtgagactggtagcccttggttgatgaggcaaaagttgggaaagggcttggaatgtccaataaaaggttacccaaaggtcagatctcaaacctacctctgaccctggcctctgtcctgctcaaaccccctcccaaccttcccaccctcagattaaagtccaggcttctcagcctggagttcgcagaccttcaggccagccctgtccaaaagacctttctagactgatgcaaatgttctctgtactgcctaatacaatagccactgagcaattgaaatgcatggccagtgtgactatggaagtgaagtttacatttcatttcatttcattttaattaatttaaatagccacctgtacccagtggtgatcacactggacagcagagctgcaaggactgtgcctggctttctaaatctgcccccaaagcctctttgccaaaggcagcaatgctcttctgcctgcctcaggctgcttcccacctcctggcccatgctatggcctctgcctagagcaccatcccatcctctgccctgattccctcacaatcacctcaattcccacttaaatgtggtggagccttgaagggggtgcagggtttgggtaggttgcttaaaatgtcccttcctcccattctacctcctaaattaggtgatgtaaaaccacagtggtgacattcattatacagctacttctgaaaaccctggaggaaaggcactatccctggcctggggacgctgaggcttcaggagagagacaagcctcatgggtacccaggcctccagccacaaagggacagccaagatacaggtgtggctcagagggccagaaaaagttgaggggcagtgctgagggtcagattcccagttccctgcctcttgccaacacagggataaggggccaagcagaagagacaaagagttccttctctaccagatctctgacggaggtgcccagcattcttccccaggtcccagggagcctcttagagttttgggagactcttggatgagaaccaactcatctttattaaatgcatcgtgtgtgtgtgtgtgtgtgtgtgtgtgtgtgtgtgtgtatagcacatacttcaggcttgcggcaccaccccatagagctggtgaggaagtaacttctgcttctcattgcaactgtagatccatcggggacgaacgaatgccagggaggggttgtccatcagggcctgcagggtggggtggagtccatacgggaatgtgtcatcgaggggaggacggaggagatgcaaaggtgtgcccgggtctcccattctctgcctctttggtactcacctcctcaaagctgggatcccattcctgtgctgtgatcacaaactgaacccggtcactcatatagtcctcgagctccctggcgggagagaagaaaagaggtagaaggcacatcagggaatcagcactgacgtcctactccccagccactctcaatggctgtccccacactgtccccacctatgcgcctctaggttgcctctaggctccattctttcatgtatccatcttgccacagccacaatgaccagagctcccacagtggctaatcctcaggctgtccctttcagaagcaggggtaggggtagggatcctcgccatacagaagaggaaactgaggcaagcaatgcaccctgggctgccggtggtgggcaagctagcattcggattccatgacctgtgcccacctgctgggcatggcccttctccatcctcctgatggtcttctttcccacacccccacccctcccagcaggtccctgagcgttcccttggatccatcaccccttccccaccccagtccctggagactcacccattgaaggctgtgacgtatcggatgagtttccgccgctcgtccccagggaactccccgtaaagaaagaagtgcttgccctggaagaaatctgcaggagagaagggggctaaggtaagcatgaggccccaggagttcccaggcaccaaacaggagtgacgaggctgacccagcagctgaggagagggctgtccacatgtgggcagggattgatggcaggcagtggaccctgcccagcggcccatcagagcctcctggggaggtaggttggttggttggttggtttgctttaatggtagaagatacaatgcctattattgtgatttgtttctgaccgacaggctggagccacttacctctctctctctcttttttttttttaagacaaggactcactctgtcgcccaggctggagtgcagtggcgtgatcttgcctcactgcaacctctgcctcctgggctcaagtgattctcccatctcagcctccccagtagctgggactacaggtgcatgccaccaagccagactaatttttaaactttttgtagagagacggggtattgacatgttgctcaggctggtctcaaactcttgggctcaagcaatcctcccacctcagcctcctgagtagccaggactactgagtagcacaccaccacgctcggctaatttttaaaatgttttgtaaaggcgggggtcggggggggtctcactatgttgcccaggctggtcttgaactcttggactcaagcagtcctcccacctcggcctctcaaagtacggggtgagccaccacgcctggcctgcctggagccacttaatgagcttagtccaggctgaaaacgtcagtatctgccacttcttcacctttgctctcctttccaaccagtgcctttcttgttctgacctttggggtggctccttctttccattttaaggtgactctctaggccatcaatttgctgatgccactttaggggcttgggagaatcaaagcatcttcctgcccatcacccacgaggaactgggtggaaacggctcttctggaagccccagaaccacacctctgcacagcccgtgactgtctttcctctgctcccttcattctcgaagaagctctgcctccctgcccctcatcccacaactccctgcagagtttccccatttccttttgttcttattcttttacactggaaatgcaaacacacaatgtgtgcagacagcatccacgtccagagtgatggctgatgttaaagcagacactggtgtgcacccacccagggcctgacagagagcagtgcccctgtcacctggtgtgcccggcttcaccccagaccaacagaacggcacctgagcaagtgaagcactagcatgagggtggggccctcacccctgacgtgaaaaaaaggaggtcacacctggcacatggctgcgaggggagtggtcagaacaagaaatctggaggggagaaaaaggcaagtcacagagaggatgctgaaaggaaaggaacaagcctggcagaacctgaaggtgctgaggcagggagtgggttgaggaaggagaggggaggcaagacacgggggcagcagtgaccccagggctggccagggcaagtcccagctgagaactgagaagagaaaatgccacttcaggagggatggggggatttcccacctgggagctcagggactggcagatcaggaggctcctggtgttcctcactgtccgtgttctcatccgtggagcctgcatacgggtcttccccattctcctcctggccagggggcagtctgtgttccttctgctctgccaccctgggggtgccaagaggagtagagagtgagcatgcagagcagcctcccctacacccaaggccagggacaccccaacccccagccccagccctacctcctcagctcatcctctgtgtccccagaatcttccgccccattgtcctgtccttctgcaagtagaagctcagtcaatgcaaggctgccttgtctcctgggaagactggcagctctcccagtatggcacagacccaggcatctcatgcccccagcctcaactgccctccagatccagtcgtctgggcccccagcccctcctccctctgatccaggagtccaggccccagcccctcctccctcagacccaggagtccaggactcagcccttcctccctcagacacaggagtccagcccccagcccctcctccctcagacccagaagcccaggcccccagcccctcctccctcagacccaggagtccaggcccccagcccctcatccctcagacccaggagtccaggtccccaggctctcttccctcagactcaggagtccaggccccagcccctcctccctcagactcaggagcccaggccgcaggccctcctccctcagactcaggagcccaggccccagcccctcctccctcagagtctgacctgactgtaccccctcaatgtctatatcttcctggagcactggtgaggctgctttggtctcttcaggggttgggggcttctggggtgagctgggtccagctgcctgagtgggcttggttttggtctggggttgctaaggagggagagtgggtgggtgaggagggcaggaacagtgtgggtgtgttgggggggtacctgcaagaggcaagagtgggaagtttggggtgccacagcggactcatgtcatcctcccactacaccctcccccactggacagggggcatcagaccttctgaggaagcttgggggcttcatctccgctgccaccgctgtgagaggcctcatcctcctcactgctggaacctggccctgccatgaggtacctaggggacaaatcgggcctcagacaaacaggcccaagggaagtggggagggcgttcaggaggcaacagccattggcatttactaaaatactcactctagtgggcctcatggtcttgttcccagcccattctctcccagctcaggaaggccccagtgaacccagtcagtctggccacctgccctgcagacctgggtaccccctttcttcccctccctctttttttttttgagacagagtccattccatcgccaggctggagtgcagtggcctcatctcggctcactgcaatctctgcctccaggttcgagcgactcccctgcctcagcctccctagtagctgggattacaggtgcacaccaccatgccccgccaactttttgtattttagtagagacacggtttcaccatgttggccaggatggtctcgatctcctgacctcatgctctgcccccgtcagcctctgaaagtgctggaattacaggcgttagccaccactcctggccgcttttttttttttttagacaagatctcactctgtcacccaggatagagtgcagtggcgtgatcttggctcactgcaacctccacctcccagggttcgagcgagtctcctgcctcagcctccccagtaactgcgattacaggcatgtgccaccacgcctggctaattttgtgttttttgtgttgttttgttttttaagtacatacgaggtttcatcacgttggccaggatggtctcgaactcctgacctcgagtgatccacccacctcagcctcccaaagtgctgggattacaggcatgaaccacagtacccagaattcccctccctcttggggaagaaatgtctcaattcagaaaggaatgaaaaatcagaactttctcctttaagaatcaaaggcagtttctcattaggaaaatacccaccatttaaggggaaaatctcaaagcaaacacattttaaagactacaacactataatcatggttccttaagccactaacattccaggaaaaggattttcctagctctaacaacagtagcaggttcccgtccgggagggaggtggggggccagccgccccgtcgggggggaggtggggggccagccgccccatccgggagggaggtgggggggtcagcccccgcccggccagccgcccctccaggagggaggtggggggcgcctccgcccggccgccgccccgtccgggaggtggggggcgcctctgcccggccgccccttctgggaagtgaggagcccctctgcctggccaccaccccgtctgggaggtgtacccaacagctcattgagaacgggccatgatgacgatggcggttttgtggaatagaaaagggggaaaggtggggaaaagatagagaaatcagattgttgctgtgtctgtgtagaaagaagtagacatgggagacttcattttgttctgtactaagaaaaattcttctgccttgggatgctgttaatctatgaccttaccctcaaccctgtgctctctgaaacatgtgttgtgtccactcagggttaaatggattaagggcggtgcaagatgtgctttgttaaacagatgcttgaaggcagcatgctcattaagagtcatcaccactccctaatctcaagtacccagggacacaaacactgcggaaggccgcagggtcctctgcctaggaaagccagagacctttgttcacttgtttatctgctgaccttcccttcactattgtcctatgaccctgccaaatccccctctgtgagaaacacccaagaatgatcaaaaaaaaaaaaaaaaaaaacacaacagtagcaggttgacacttacatgggacttcctacatgccaggtagcacgtgacaaatactgagtcactgaatcctggggtaggtcctatttttggccccattttacaggtgaggagactaaggcacagagagattatttaatctgccctaagccacagggaaggtatgcagacacaaatgaatgtattagctccatttttctgagacatacatgttaagacccttctgcatttaatttggttgttttcaagctggtgaaatgctgtttaggtaagtcacactcataaaacggtgcctacaggagattcagaggatttaaaatgtagtagttcattaacagtcaatagcaggtttacttaactttttcttcaaagtgctctattcaaagattaaaaaaaaaactaaatttgtgcttattaggtatggagagtcatcctcttggggtcttccttctatagttgaatttttattttatttttattttttgagacagagtctcgctctgtccccaggctggagtgcagtggcatgatctcgactcacttcaaccccttcctcccaggttcaagggattctcctgcctcagcctctagagtagctggggctacaggtgtgcgccaccatgcccagctaatttttgtattttttggtacagatggggttttaccat[137 bp omitted]agactggagtgcagcggtgcaatcatggctcattgcagcctgaacctcctgggctcaagtgatcctaccacctcagcctcccaagtatctacgactacaggtatgtgccaccacacctggataatttttttcatgttttgtagggatggggtctcaccacgttgcctgcatcatatagttatttttttttagtttataaatgagtacaagccagaatttttaaaaatataaaatgctttgtgaattctttttgttaagaccagttgcaaatccaacactgtttgtctttttccctttctttcatgccctccttaagctctcccaggcagataataacccaaatctggttccttctgccccagatatagcaccagcccatcccctcttctgttcctgaggccccagcctactcaggagtccccacctgcagcctccccttgacacttcatccctcccaacagagcctgcccctgcccccatcaaaccttctgtgactcccctctgctcacaagaggaggcctctggagctggatgggcttcagaattttgaatctttcaggttttagagaggcaaatggctggcatacagattgttacataaactcccaggagggcctgggggagcaccccatgatcaaacccactaatatttctgcagttaagaccatgacacacttaaggggataaaaaaaaaaaagtccgcaaatagcctcacattagttcaggatgactgcagcgaaatgagtttgtgctgaacctagaaaagaactttcagcttctagagatgtttggattcctgaataacagatgagggttctgtgaagctgcatggagcccagtgtgtagcctgggctccggaagccccttctgacctgagcccacccacctcacagcctcgctatcccccaaggcaaataatttctcaaatacaccaggtacaactaacttctgaacacactcaggccatggagtacaatccagtctcccctccaattcatggacctcagatatgagctagcctttgctcagtccaaagccttctgtggttcctaatgccccagtcccatttttcctgccacttcttgcccctgtgtaagctcagcctcacctacaactccaggcagacaacaggctgacctgaccttgtctcctctgcccagcatgttctctgcctctgttcagcctgaaaaacctctcttggaccttgaagacccctcgctctctgcgggccaccctgtggggcttccactgcactgttacaacaattctgatccctcatcaaagtgagaagccttcaagggcagggctcaatgactggatcctcagccttgcacattccagcctggcaccaagcaggggcttctgggactcattttggtttttgggttttttttttcttgttgagatgggagtctcgctctgtcacccaggccagagtgcagtggcacgattttggcttccaggttcaagcgattctcctgcctcagccttccgagtaactgggattacaggcgtgcgccaccaagcccagctaatttttgtgtttttagtagagatggggtttcaccatgttggccaggctggtctcgaacttctgacctcaagtgatccacctgcctcagcctcccagagtgctgggattacaggcgtgagccactgcaccgggactcactttgaatgaatgaatatggaccctaacacttgttctcccacccctgagtttttgcacaaactgctcctccagccttttctgataagcaggcttcacagagccctctgtgacctcccaggcaggtcctccttccctcatctggagtaccccagcccctgccccgctcctctcagtagtctgctggctctgggctgggaccacctgtgttctccgctggcaggccccagtctgactcccctccagattcctggcattgcccagcacaggataaggagcagggttggcgtgtgaggccttacctctgggagggcagccgccgacgcatgcggtgacagtccagcacccactccttacgcacgatgcggcctcccaggcctaggacctggctgtacttgggggtgttggcaaaggcacagctggtggggggcagaagtgaagatgccagttaggtgtgatctgaggggcaaaggggaacgagacaggggagacagacagagagagagagagacagacagacagacagatcatgagattgaggtgggagaaacaaaaagaggttggagaccaagggagagatgcaaaaatcagagagaagacaaaggctacagaatgcagtgagaaagaaagcaagtgagagagagagaaagcatgcagcatagtggacacagagaaagcacaaggtggaggagacacagggagctgggggagaaactgcagcggcgcagggaggggggcgcaagcctacatgaggtgcgtgctgtcccgggtccagtctggccgatacttggccccaagctctagggccttatctcgcagctcggagcggaaggggttctggaagccactcagcaccactaccacaccctgaaggatcttccccagctcctctgggccagctcggggtcgtctgggctcggtgccttctcctcggggtttgcctgtcactgccccctgtgctcgggcagggactggggctgtggctggggtacgagttggagctggcactggagaagacaaagagtagattaggttagcaccactgggggtcaacccccagcccctcctccctcagacccagcagtccaggccccagaccctcctccctcagacccagcaatccaggccccagcccctcccccctcagacccaggggtccaggcccccagcccctcctccctcagacccaggagtccaggcccccagcccctcctccctcaggcccaggagtccaggcccccagcccctcctccctcagacccagggatccaggcccccaacccctcctctctcagacccaggggtccaggctcccagcccctcctccctcagacccaggggtttaggccctcagcccctcctccctcggattcaggaatccaggcccccagcccctcctccctcagacccaggggtccaggcccccagcccttcctccctcagattcaggacagcaggctccagccccgcttcccctaggacacaggagcacaggcccctgtggaaacaagggatctagttagctcacatttaggtctcttgggaacagatggcgacagctgggctggtggtttgctgggggtcttcttttcttcttggttcaaatccaacttcctcttccctttgggagactcctggggctgaggggatggggatggattgaggcctccagcttctctcctcctccaccccaccaaagtctgatgatttcaccttggaggtgctgcctatggccctggagactggagaggctgaggaggcagcactagaagcctggagggtagcagctgcatagctaggtcctgctgggtcgctggctgtgactatgaagggagaaagtggatccaggatgagagggctgagccccaagaccctttcactcctatctatgggacacagaatattgttgccaaaacccaccagtgatccaggagtcccagcctccagacctctcaaccctcaggacacaagaggccaggcccaccttcctccaccctgagacccaggagtccaggactccactaccctcctccctcagacccaggaatctgagccccagccccctctaccctcagacccacgagtctaggtctcaaccctactcactcaggacccacgttgtccgagctcacctggggatgtcttgttgatccggctgaagaagagagcccccggcctcagagagttggcgctctcatcctcctccttcacacggaactggccaagcttggtcactgtcaccttctaaggtcccgcaaggtcagtattataggtgggctgctggcaggtgggggtggagaggcagggagaaggccatggggagtgacaggtacagcttacctgggacggggcctctgcctcatctttgtctggggggctatgaaaccgtacaaaactcaagccaaagggggagtcctgggaaaggaggggtgggagtcagggagtctggcccaaggacagaggccagggcccaagacccttttcactcagggaaacctcttcctggctccttccctctcatgaacacccatgttgaaggaggggccctggcgatggtgatgacaattataggattaagctgttatgactgagccctaactctgagtctggctccaagcccttttcacgcattagctctttgggcaattggcagagtctactaggtgtcccagcgaattcactgccctatgcacaaactcctgcctgtggaatgggagggagtgctgcgtgccacttccagaacacagaagtgttccaggctctctcctctgccagctggatgcagagccagaaaataggagaagtctgggtccctgcacgacctcataaggagaagccagctgacaggctaaacactccccaggacagttacctgggcaagaagcacacctttagtgtgtggcatcatcacatactccagtctcactgttaccacagcttttagcatcccttaacctacagcaaccctgtaaggatcaggcaatggaggcccagagagcgtaagtcacttgcccaagatcacacagctaaaaagtggtatagccaggacgtgaactcagtaatcagacgccagatctcctgatgttaactactaggcccactctactaggccacctctctaacaagtcagttcccctcctccgattcccctctgagatgctgcagttcacccttcctagattcctccgggagatgaaacttctcattacaggaaagatcccaaacccatttcagggaacgcagggacccagcctccccataatcccatgggacaccagctgtctactcctcccagccctatgggactcaatattggcccttatttccctccttgcccaggaccaaggactctgcaccctggctcccaccctaggtaccttgctgtagggctggctgcaaacaattttgacccggtcccagcgcttctcggcggctgcccggaccagcttgtcaggcccaaacatgcgaacgcggttggggtttgagccactgcggctctcggaaggggacatgaaagatgaggtgaccagaaggacctgggtgggagaagccacagtgcatgagaaccagggcaggttggcttagatgagagcttctaggggctggggaagagggcacagggcccacacaggggactgggagtcactagaatgtagcttgggcctagatgtctccagaccctttgtttctaggccttgagtcagtcctgccctgacacaggccccagagggatctctttatcctccagatgtgagcgacccttatctaaattctcccatggagtcttccatatctggcaatacagcgggctacatgtcctaaggaactttcccggcagagaatattcagtaaactggcacaatattcaaacaccttttggaaatgcacaggtgagtcagcggaaaggcaaggggaattactagaggctggaaatgagaaaacagaatccagagagtcaggcgagctgcactaagtattaagtgattgtttctcagctcaaacctaccctctacaactcatctctgtgatctgggcccgcacttggcaaaccacctttctgcttccctagctgatcgtgaccaggctctgccaatagggggggcaagagagagagtttgcaaggctgcaggagggaggaaggaccagcttctcgtgcattgcagatcctgtgagcatcacccccagttaagcttctgctgctgcagtggttcctgcctgcagcagcagatgaatccagtttgcagtgtcccaatacctccagaaacagcctcattcagcccctctcagcagccggtgggggaggaagccctcctcaaacgatctgaatttcagctcctggagccccacctcccagtttccaaacatctacgtttcaataattcctgctcctttcttttgttcccccaaccctgggagtggtagctactccctgcggttgcttctccctcatatcttagtcttctagtaacacctagttactggttctttctatcaaattatctgttaaaataactggtgtggttttaatctccgggcaaggaccctgactgacccggcagcactcatgttggtagtttgtcatggtgctgatcccagatagcaaataacttgattttatttattattattatttttttaagagacagggtctttctctgtcacccaggctggagcacagtggtgcgatcatagctcactgcagcctcgacctctgggtctcaagtgattctcccaccttggcctctgagtagctgggtctagagatgcacgacaccacacctggctaattttttattttttgtagaggcatggtcttgctatgttgcccaggctggtcctgaactcctggcctcaaatgatcctctcacctcagcctcccaaagctatagaagtacaagtgtaagccaccacacccagctagaacttgatctttaagggttatgcacgtggtggtgaaagagaacaagagagaaaacctaggctccaagcaagggagagtggcatctcagagatcctcaccacactgcatagaactgaggactccccaaaggcaacgcccacactagttacatgaaggggaaataagcctgtggaaagagtccctgggaggcctgtctgtcttggccttagcttggggggacaccaaagaagaggtgaaaattcttctcgggagaactcctcacaagtctgttctctcaaggaattgagagt[140 bp omitted]atggtaaaaccccatctctactaaaaatacaaaatttaagccaggcatggtggcagacgcctgttgtcccagctactcgggaggctgaggcacgagaattgcttgaacccaggaggcggaggttgcagtgagctgagatcgcaccattgcacttaagcctggtggacaagaggccaggagttcaagaccagcctagccaacatggtgaaacaccgtctttactaaaaatacaaaaattagctggacatggtggtaggcacctataatcccagctactcgagaggctgaggcacaagaatcgcttgaacccaggagttggaggtgatggtgagccgagattgtgccactgcattccagcctgggtgacggagcaagactctgccaaaaaacaaaaaacgaaacaaaaagactgggca[133 bp omitted]catggtggcgcgtgcctgtagtcccagctactcgggaggctgaggcaggagaatcacttgaacccaggaggcggaggttgcagtgagccaagattgcgccactgcactccagcctggcaatagagcgagactccgtctcaaaaaaaaaaaaaaaaaaaaaaaagatgaatgcagccacttttggttgggtatattttgttactgacttagtctcttttctaactgacatgctgtgaaattataaaattggacaataaagccttttgctgagaaaaacagaacataactatagctctctttgtgcacagctgattatgcaaaggaaacaagaaagacaattatacagaagggaagttttcttcctgaccttgactatacttgtttataaaaggcctgatttggagctgacagggaagctgcatttatcatctggtgactaacatgggaaaaccctgtcctactaaatacaaaaaaaatagccatgcatggtggcacaggcctgtaatccgagctacttgggaggctaagatggagaatcgtttgtacctgggaggcggaggttgcagtgaaccgagattgcaccactgcactccagcctgggcaacaggagcaaaattccatctcaaaaaaaaaaaaaaaaaaaaaaaaaaaggaaggagggagggaaggaggggagggagaatggaaggaaggaaggctcctgtgactttgggtttgtgcctttgatgtttttgaagagtagaggtcagtgatttttgtcagatatcacttattgtacaaagtatctgatgtttccttgtgattaatttaggttgcacactttggccagaataccacagaagtgatgtgtaatatacagtttattttgtatattgacttctcatcttgtgaccttcacttactaaaccttgtagtttgtctagatctcttgggattttctgcatagacaatcatgccatctgtgaaaaaagatagttttcttttttctttttctcaccttgtcacactgactagtgcaaagttgggcatggtggtgcaagcctgtagtcccagctacttgaggggctgtggaaggaggatcacttgaacccgggaggacaaggctgcagtgagctgagatcgtgccactgcactccagcctgggtgacaaagtgagacctcgtttcaaaaaaaaaagagtaggccaggtacacacagcagctcacatgtgtaatcctagcactttgggaggccgcagcaggtggatcacctgacctcaggagttcaagaccagcctgggcaacacagtgaaaccctatttctacaaaaaatatttaaaaattagccgggcatgatggctcccactagctacttggggggctgaggcgggaggatcacttgagcccaggaggcagaggttgcagtgagctgagatcatgccactgtactccaacctgagcaacagagtgagacccccatctcaaataaataaataaataaataaataaatacatatatacataaataaataatatggttaaaaaaagagacagtttggtattggcataaagaaaactatacatatcaatggaacagagaagagagtacagaaataaacccatacatatggttaattaattctcaacaaggagtcaaaatgattcaatgagaaaaggcaagtctttttttttttttcaaagtattttcagccaggtgcagtggctcaggtctgtaatcccaatactttgggaggccaaggtgggaggatcactttaagctcaggagttcaagaccagccaggcaatgtagtgaaaccccatttctacaaaaaattttttaaaaaattagccgggtatggcggctcacacctatagtcccagctactcaggaggctgaggctggagaatcccttgagtctgggaagcggaggttgcagtgagccaagatcatgccactgcactccagcctggccaacagagtgagactctgtcttaaaataaataaaataaataaataagcattgtcaacaaacatataaaaaagatacagaaaagggccgggtgcggtggctcacacctgtaatcccagcactttgggaggctaaggtgggcagatcacaaggtcaggagatcgagaccatcctggctaacacagtgaaaccctgtctctactaaaaatacaaaaaattagccgggcatggtggcacgtgcctgtagtcccagctactccggaggctgaggcagaatggcgtgaacccgggaggtggagcttgcagtgagccgagatcgcgccactgcactccagcctgggcaacagagtgagactccatctcaaaaaaaaaaaaaaaaaaaaaaaagatacagaaaaaataaaccttatcccctgcttcacacaatacacaaaaattcacttgagatgaaacagagatctaaatgtaaaatctaaaaatagaaagcttctagaagaaaacataggagacaggcagaataacagctcctcaaagatgtttacatcctaatccctgaacctggaaatgtggcagaaggcactttgcagatgtgatgaacttgaagatgttgaaatgggggagatgcccctggattatccgggtaggccaagtgtcatcataagggtctttataagaaaggagggctgggtgtggtggctcatgcctgtaatcctagcactttgggaggctggggtgggtggatcacttgagcccaggagtttgagaccagcctgggcaacacagtgaaaccctctctctataaaaaataacaaaagctagccaggagtggtggtgtgcacctgtagccctggctacttgggaggctgaggtgggagaatcacttgaacctcagaggcagaagttgcagtgagctgagaacacgccactgtactccagcctgggcaacggaaatg[223 bp omitted]ggctgaggcagaagaatagcttgaacccgggaggcagaggttgcaaggagctgagatcgcgccagtgcactcactccagcctgggcgacagagcgagactccgtctcaaaaaaaaaaaaagaaaaagaaaaaaagaaggcaagagagtcagagttggagaagtaacaatggaagtggaagcaggcgttagagtgacaggagtgctggctttgatgaaggaagggtcacaagctgaggagggcagatggactctagaagctgaaataggcaaggaaatggattctcccctagagcctccagaaggaacagggctctgcctacacctagattttagcccagtgagagtgatttcagacttctgacctccagaacagtcgaataatacatttgtgtcattttaagccatgatccaaacttgctctcttccctgatgtgcagtttaccgccctgtgtctgccttctgtctcctccgtacactgggtgatcctccagagggcagcaatcaggtgtgactcacatctgccccatgtcttcccagccccagcccctgggggagacggtgatgcgagcatgaggggcagaggtcagtatgggatccatctcatagccctgcttacctcatagtcttgctccccagcgcctccagctgaactgcccaccagcacctccacgaaagctgagccatcattcccaatgtccacactgtgtatctgctcctccttctccaactgtgggcagagagagaggccactgtcagtgcctgctctgcctctgggctcactgtgggacctcaggatgaatctcctttggatcaccatgtccctgtaatgtcaattctgtgagggggcacaccagggttgaatggtgccatgtgtcccctccatgcagcacagggtatggcatggagcagaaactcacaaaatagtcactgaatgaatgcatacgcgcccacctcacacatacctgcttccctgacctctccagactccaccaggtcagcttatcacacactgccatagagctctccttgataagcacttgccagagttataactttattcaaatcatcatgcagacaaacagcacatgtcacccctcacccacaatcgcagaggactccaggaaacctccctgagggcaggggctttgtccgatcttgctcaccgctggttcctgggtttgaatcccagctgtgctgcacactagctgtatgaccataccagttaaccttttggagcctcagttttctcatctgtaaaatgggaatgaccaccatatctaggatcatgcacataaataatggccacagggcatggcgaagagtaggcaattatctgctgtcagtcaggaggtattattagtcagtgctagacaactatttgttgaaagaagaaaagagctacctataggagggctcatctcaaaggatctgccattcctgtctgacagatgaagatgcagaaagccgtgcgggccatgcgggcacgggaggcagttaggttgaggcaagtgtcctgccttccagtttggggctcttttattaggatcctagaatgacgcattattacaactctcaaaggtacctgggccaggtgcagtggctcaagcctgtaaatccagcactctgcgaggccaaggcagtggaccacttgaggccagcctggccaacatggcaaaaccccttctctactaaaaatataaaatatagccgggcatggtgacacatgcctgtagtcccagctcttcaagaggctgaggcacaagaatctcttgaacctaggaggcagaggtttcagtaagcagagatcatgccactgcactccagcctgggtgacagagcgagactctgtcacaaaaaaaaaaaaaaaaaaaaccaaggtacctagtccaccctacactgccctctcccacccctggtgatgacagatgctccaatctgctctgttgcctccctgtcagatcatctagacatcacctgcacactgctatcaacaggaacaccactgtatggaaggagggagcctggacttggggtgaggtaggcctgggctcaaatacagcaatgccatttccaacctgcacaaccttgggtgacgtattcaacgtctctgtgaggcagtttcctcacatgcaaaaagggaagatggtcattaacaaccctccctccttggccaggcgcagtggctcacgtctctataaccagcactttgggaggctggggtgggaggatcacttgaggctgggagttcaagaccagcctgggcaacatagccagaccttgtctctacaaaaattacaaaaattagcaaggcatggtggcacatacctgtggtcccagctactcaggaggctgaggaaggaggatcgcgtgagcctggggaggtcaaggctgcagtgagtcatgttcgcatcactgtactctgggcgacagagtgatgagaccttgtcttcaaaaaaaaacttaccctccctctgaaggaagttgagatgacacagaattaacaactataaccacaactgcggccaacatccgagtgcactgagcgctcctggtgtgccagactcctgctaataatacatgtatctactctcctgcaatggctctgccaggcagttgctataattatctccatcttacacatgagcaaacggaggcaggaagtggttatgtaacttcacagctggtgggtggcaaagccggaccggaacccaggcaggctggcaacagtccacgcgtgctcctccatcacaccactgacgtgctagaggaggaagatggtgctggaggaagggcctgcctaaggctgaggccggcagacctcctgctgactcccctgcctccaccgccattcccagccctgggccctgggcagtgtacagtgctgcctgggctcatgagatgtcccagtctgggccaggtgtggtggctcacacccgtaataccagcactttgggaggctgagacaggtgaatcgcttgaggtcaggagtttgagactagcctggccaacatggtgaaaccctgtctctactaaaaatatgaaaattaaaattagccgggcatggtggtgagcgcctgtaatcccagatactggggaggctgaggcaggagaatcacttgaacccgggaggcagaggttgcagtgagccgagattgtgccactgcactccagcttgggcgatggagtgagactctgtctcaaaaacaacaacaacaacaaaaacaacaataacaagaagtcccagtctgactgctccccaggccaggcttggtgactttccaccagccacaacggcctcccttctgtgccaagaacagtctggctccttcccacctcagggcctctgcacctgccaatccccctgcctagaccactcttccctcaaacatatccatagctgggtaaaagtttgccttctgtgcttcaggtgcccactcagatgtcacttcagaccataagtaacctacctcgccccctacctggtgccactctctatctccctacccgactttacttttcttcatgattactgcctggtgttacacagttacatcttttttgtttgtatttgtctagcatctgtctctcccgccagacttttaagctccacaagagcaaggacagtatcgtctgagttgttccctactgtgtccccaaggccaagaacagtgtctggtccttcccagctctgctgatttcctgctgtgtgatcctggagcaaatggtttcatttcaccccttgtgcctcagttttcgaacctatgaaatggggacaataacaacgtctatctcataaagttgttgagaacattcaaatccataccaagaatgagaaataacataccaagtgcctggaatactgcctggcaccgagcaaacactacataaatgtcagctgcgaatatcattaacacagcaggcctctactgcattcccaatggatgtacagacagacgcagaacaggcgcccagcaaccgtttgcagaagttactactcaagagttattaagcagtaactctggctctgtcctcccttaccaagtggccctgttgagccccttctctgctgcttgcctgggtgtcccatctgtcacaagaggatcatcatggctaacattttcggattctcaccatgtgccaggtgcttggtgtatgagtttcctgttactgttgtacaaattagcacaaactttgtggctaaaaacacaaatttggccaggcgcagtggctcacgcctgtaatcccagaactttgggagactgaggcaggcggatcacctgaggtagggagttcgagaccagcctgaccaaaatgcagaaactccgtctctactaaaaatacaaaattagccaggcgtggtggcgcatgcctgtaatcccagctactcaggaggctgaggcaggagaattgcttaaaccgggggggcggaggttgcagtgagccgagatcacaccactgcactccagcctgggcaagaagagcgaaactccgtctcaaaaaaacaaaaaaaaaacacacaaatttaatatcttacagatctggaggtcaaaagtctgaaactcggccttacagggctaaaatctagatgcggcagggctgcattccttccttccgggagcactagaggagaacgtgtctccttgcatcttcggcttctcgaggccacctgccttccttggctcacagtcccttcctcgtcttcaaagctgctgaaagcgctggcatcactccaggctctgcttgcatcttcacagctctggttccagctctcttgcctccctctttcccttataaggcctctgggggttacgtgaggcccaccagataatccagggcactctccccatctcaagatccttaatttaatcaaacccacagagctcctttggccattaaaatatttccaggttctggggatgaggacatgaacatcttttgagcaccactgttctgtccaccacacttggctaagcatgggccgggcatcactgaagcctcaaaaccactttaaatagaagggtctgttacgactccagtttcacagatggggaaactgaggctcagacaggtttaatcaatagcttacatggcacacaagctaataactagcagagtacttcggacgcaactgcctgactgcaaagcactgtccaataccaccactgttctcaactcctttctttccatccctgagtcaaactcaacatctttacctctcccacaatattcagcatagctcctaaatgtggtaggatggagatgcttgtattttaaatgaacaattcctactgcatatataactatttctactttaaacaggcactccctgacatttcttctttgtatataaaaaaagtcctggctaggagcactggctcacgcctgtaatcccagcaccgtgggaggtggaggcgggagaatcacttgaggccaggagttcgagaccagcctggccaacatagcaaaaccctgtctctaccaaaaataaaaaaagttagctgggtgtggtgacacgcacctcaataatcccagctactcaggaggctaaggcacaagaattacttgaacctgggaggtggaggttgcagtgagttgagacgagccactacaccccagcctgggtgataaagtgagactctgtctcaagagagaaaacaacaggctgggcacagtggctcacacctgtaatctcagcactttgggaggccaaggcaggcagatcacttgaggccaggagttcaagaccagcatgaccaatatggtgaaaccctgtctctactaaaaatataaaaattagccagacttggtggcgtgcacctgtaatcccagctacacaggaggctgaggccagagaatcacttgaacctgggaggcagaagttgcagcgaaccgaaatcatgccactgcactccagcctgggtgacagagtgagactccatctaaaaaaaaaaaaaagtggccaggcacggtggctcaggcctgtaatcctagcacttcgggaggcagaggttggcagatcacaaggtcaggagagttcaagaccaggctggccaagagggtgaaaccccgtctctagtaaaaatacaaaaattaaccaggcatggtggcaggcgcctgtaatcccagctactcgggaggctgaggcagagaattgcttgaacccaggaggcggaggt[131 bp omitted]tggggtggtggctcacgcctgtaatcccaacactttgggaggccaaggcaggtggatttcttgagcccaggagttcaagaccaacctgggcaacacggcgaaaccccgtctctactaaaaacagaaaaattagttgggcatggtggcatgcgcctgtagtcccagctactcaggagactgaggcacgagaatcacttgaacctgggaagcagaggttgcagtgagccgagattgcaccactgcattccagcctgggcaacagagcaagactcaatctcaaaaaaaaaaaaaaaaaaaggtttatatatacatggtaacaacccaataaatgtccatcagttgatgaatagataaacattgtacagtatatttatggaatatcatccagttatttaaaaaactgaagttgtgatatatgctacaacatggatgaacctcagaaacattatgcaaagtgtaacaaggttaagtgtaaaagaccacgtatacatttataagtccagaatacgcaaatccagagaagcagaaagtagatcagtggttgccaagggcaacattggggagagaataagaagtgactgtttaatggttatgtggtttctttttggagtgatgaaaatattctgaattagagaatggagatggttgaagaacattgtcaatatgctaaaaaaaaaaaaaaaaccctgaaatgtgcactttatttatttatttatttatgttttttgttgagacggagtctcactctgttgcccaggctggagtgcagtggtgcaatctcagctcactgcaaactctgccttccagttcaagtgattctcttgcctcagcctcccgaatagctgggactacaggcacgcaccaccacccccggctaatttttgtattttcagtagagatggggtttcaccatgttggccagcctagtctcgaatccctgacctcaagcaatccacccgccttggcctcccaaagtgctgggattacaggtgtgagctaccgcatctggctgaaatgtgcactttaaatggttaaaacagtaaattttatgtgaatttttctcaaaataagagatgagtgctcagtatgtatcagctgtgaggataagagcacaagatgactatcaccgatggcctgggttcgtgtgcatgcagctttctcagggagacacagttctgatatgaactgttcctgaaacaaacatggcacaggaaggcaaagttcctgagatatattgctaaaaaactgtttcacatccatgaaatgcaatcttttcttttttttttttttttgagacagagtcttgctctgtcacccaggctagagtacagtggcacgatctcggctctctgcaacctccgcctcccgggttcaaacaattctcctgcctcagcctcccaggtagctgggattacaggtgcccaccactgcacctggctaatttttatatttttagtagagacagggttccacca[139 bp omitted]ctgcgcacggcgtggctgacgcctgtaatcccaacactttgggaggccaaggcaggaggatcacttgaggtcaggaattcaagaccagcctggctaacatggggaaaccccatctctaccaaaaatacaaaaattagccaagcctggtggcatgtgcccgtaatcccagctactagggagattgaggcaggagaatcacttgaagctgggagggggaggttgcagtgagccacgatcgcactactacactccagcctgagtgacagagcgagattctgtctcaaagtaagtaagtaagtaagtaagtaaataaataaataaataaataaggtagaacttcatgcagtgtgcatctccaaaatacactgttacttgaaaaaaaacacacaagggaacagtgtatatactatgaattttttaaaaagggatggaggcggtaggtatatatgcttgtatgtgtacagaatgacccaggaagaccacccaaaaaaactgctaatggtggttgcatcaggagagaagaatgagggagcaggagttggggagggagcaggagttggggagggagcagggagggatggaaagggtgaggggagattttctttttagtgtatacccttttgcaccttttgaattttgcactatatgcatataatacccattcagaaagcaaatataataaaaccccaatggccaggtctttgtggctctgtctgtaatccctgtaatcccagctactcaggaagctgcctccaaaaagcttaaaaaaaaaaaaaaaaattagttgggtgtggtggtgtgcacctatagtcctagctactcaggaggccaagttgggggatcacctgagatcaacagttcaagaccagccttggcaacatagtgagactccgtttaaaaaagaaaatcaaatataaataaataaaaccataatagttatctcaatacaacagaatactatacagaaatgacaataggccaggtgcagtggctcatgtctgtaatcccaaggatttaagaagctgaggcaggaggaatgcttgagtccaggagttcaagaccagcctagacaacacagtgagacccccatctctgcaaaaaaaatacaaaaattagactggtgaactggcacatgcctgtagtcccaactactgaggaggctgaggtgggaggatcgcttgagcccgggaggtcgagcctgtagtgagctgagatggtgccactgcactccagcctgggcaacatagtgagaccctgtctcaaaaaaaaaaaaaaaagacaataggagtcgagcacagtggctcatgcctgtaatcccagcactttgggaggccaaggcaggtggatcactagaggtcaggagttcgagaccagcctgaccaacatggtgaaaacctgtctctactaaatacaaaaaattagccaggcgtggtggtgcatgcctgtaatcccagctacttgggaggctgaggcaagagaaccacttgaacctgggaggcggaggttgcagtgagctgagattgtgccattgcactccagccagaacaacaagacgaaactccgtctcagaaaaaaaaaaaatcacaataaatcatctacagctacactgaacgacatagatgaaatgaacaaacataacaagggaagccagataagaaaagtttataccacacgattccattttatatgcaattcaaaatcaggcaaaatgaatctatgctgttaacaatcaggacagtggttacccttgcaggggtactgacagaaagaacctgagggaactgctgggggctaggcatgttctgtgctgcatctgggtgtggagtacacagggctgcagtttgcaaagagtcactgagctgtactcttacttacaccttcacttcactctatgtatgttacacatcaaaaaacagtaaaaacaaatttaagacaccacagtggcgaactgagtgattagaaaaccaataacaatcaaaaatgaccataggccctattgctgatgaacatttcttctaaaaatgacacacctccagtgacacaccagagttatatctgggtcttgtccaagccacccctccagcccaggagtagttagcaaagaggttggcatttccctctgggagcaggtgatgaacagacaacagagcctgctgtggctactgcaaacaaccaggtgtgtggggctgtcataagcagatggctaagccccatgtggtaagatcgagattttgcataacaataattagaggagaaaatgcagggtagtagaagaacccacagatgtggccaggtgcagtggctcatgcctgtaatgccagcactttgggaggccaagacaggaggactgcttgagctcaggagtccgagaccaggctgggcaacatagtgagaccccatctctacgaaaaatttttaaaattagctgggcctggcggcacacgcctgtagtcccagctatctgggaggctgaggtgggaggattgcctgagcccaggaggttgaggctacagtgagccatgactttgcaactgcactccaacctgggcaagagagtgagaccctgtctcaaaacataacataacaacccagagataagcctactgccttggtggccagaaatgtctgcctttatcagttacgtcaaaagaatcaaaattagcatttgatgaatccagagtaaccccacaaattagtcattgccagatgcaatcagtcattccaaagggtctctgacgtggagtaagttaacaaaacaactgctgcaatgctgatctcccactcctgtgtgtggcccctgcagttgattgtcaacatggagccagcaggatcctgtgaaggcctaaggcagatcctgtccctcctctgctcggagccctccggtggctcctatctcacacctggagtaaaagctcaagtcctttcaatggctttccaggccttaagtggttttttaggggttcccagtcccaccctgttacctcatctcctacctctctccccctggctgactccaccccagccatactggcctccttgctgtcacaagccagcttcagagtcttttccctagatacatacatagctcatgttgctcaaatgtccccttttcagggaggccttcccggaccctactatttaaataaaaatccttgccactgctccagctccagctggggcactctcattccccttcattaagttcctccatagcactcatcatccaacatatgtttcactgactcatttgtcagtctttccctactaacgtgaaagctccacaagactgaatttcttttgtttttaagagacagcatctcattctgttgcccaggctggagcgcaatggtgcgatcatagctcactacagccttgatcttccaggctcaagtgatcctcccgcctcagcctctggagtagctgggaccacaggcataggccaccacgcttggcagatttttgtatttttagtagagatgaagtttccctgtgttgcccaagctggtctcgaactgccaggccttggcctcccaaagtgctgggattataggcgtgagcttactgcaccccactgagagtgaatattttttgtcttctgctgtgtactgctgtattaaaacagtgcttggcctacagaaggcacttaataaatacttgactaaataaatgagtgaatgaacaaataaatccatcatctactcccgagtctataggttctttctctgcactgacaacttccccacattctgtcttcagctccacatgtgatccccaactgcctcctggatgccacccctagaatgtcccaaagtcacatcaaacctggacatcccaactgaaacacatcacctccccaagctgctccctctggggtttaccatgttggtgaccgctgcaatactccctcagtctctcccaggccagagacaggttctgtctcttctgcctccagtcactctgtttccacagcaactggggtaacagaatgaaatgtgatttccctggagtcacttgatcataagagagcccagtggaatcatcacccactaagtaataaaaacacaaatccctccctctacacaaacacctacatgttgacagagcacttgtgcagacattatgtcaccgaattttcacaactccgggcttggatgtcattattcccaatggacacatgagaaaacaggttagagaaatgaaacaattttcttgaggtcaccgattaagaggaagagctgggggcttgaatctagatctcaagactaaaactgtcagcaatctgtatctatcacagtttaaaagactgaggtcaggtgcagtggctcatgcctgtaatcccaacattttgggaggccaaggtgggtggatcacttaaattagcatttggtgctcatttgccttgaactcctgaggtcaggagttcaagaccagcctagccaacatggcaaaactcggtctctattataaatacaaaaattagccaggcatgtaaattccaactactcagaaggctgaggcatgagaatcatttgaacctgggaagtggaggccattagttgacaggcactaaacactgacatcaattggggtggaccagatgatgttacagtaacaaaggagtccctaatctcagtggtttaaaacaaccaagttgtattaacttacactgtaataatgctgtgtaacaaatcatcctaaaactgagatcttttctttttttttttttttttttttttgagatacagtctcactctgtctcacaggccggagtgcagtgaaaccatcacagttcactgcagcttcaaccttatgggctcaatcaatcctccccgctcagcctccctggtagctgggactacaggcatacgccaccaagcccagctattttttataatttttcgtagagatagggtttccccatgttacccaggctggtctcaaactcctgggttcaagcgattcacccacctcgacctcccaacatgaaaactgagacttataccaacaagcattcttataagaatttgtgggatggctgctttggctgcagtttgggaggattcaggtctcttccatgagattccacagttttctgggattagcagtaacctggcaaatgttctcatggcatattatgggagcacaaaagccaagtgcatttaaggcccttgctgaagttagatgtgctgaaattccattaagtaaatcatatggtcaaactcatcaatggagcagggaaatatactccccctccagtgggagggagaggagtggatatttgctgaatgactgcccattcacaaaaggttaatttttccgtcaccctagcactatccacagagtgttctgctccttatagtcataaagcagcccccaggccaggaacaatggttcatgcctgtcatccgagcactttgggaggctgaagcaggaggaacgcttgagcccaggagtttgagaccagcctggcaacatggtggaaaccccatctctaaaaaaatacaaaaaaaactagccaggcatggtggtgcacacctgcagtcccagctactcaggaggctgaggtgggaggatcgcttgagcccaggaggtagaggctgcagtgagccaagccaagatcatgccactgcactacagcctgggaacagagtgagactctgtctcaacagataaataaaagattgactgtcaggcaaattgtataacttctttgggcctcagtttcctcatctgtaaaagtggggataacagagcctgcctcttggggttttttatgaggactcaatgagctaatccatgtgagtgaggtgtgtagagcagcgactgacaggtaacgttgaataatgccagctctcattattattattttattttttatattttgggggtctcactctggtgcccaggctggagtgcagtggcacaatctcagctcactgcagcctccatctcctgggctcaagcaattctctcacctcagactcgccagtagctgggattgcaggtgcacaccaccatactcagctaatctataaaattttggtagagatgacatcttactgtattgcccaggctggtctcaaactcctgggctcatgcaatactccagcttcggcctcccaaagtgatgggattacaggtgtgaaccaccatacctggctattattctttaaaaaaaattatttattttaataaaaatagagacagggtcttgatatgttgcccaggctggtctggaactcctgagctcaagcaatcctcccatctcaggctctgaaagtgctgggtttacaggcatgagccacggcatccggccagtttccccttctttaaagtggagttgattggcttagacgaccttcctggacaccttccagccctgagcccactggctgcaggaggcagagtacgtggcaatgattcattttgttccagctgaggaaactggaacccagaaagtagatgccacctgcccaggaccacacactgattcctgtggtcatcctggacttaatccttgggtctcctttcctctctgctgaggggcacagggattatgctgcccattttccgagtaaggaagctgaggcccagcaaagaaagtgactaaacccactgccagttggctcaggagcagaatctggaaccccggactccagactcctagtgaggaggaggtggggtggcaggatcacctgtaggaccacagagatggtcttctcgcctgccttggctgcccgccattttcggtaagtgtctgccttgagaagattttctgcacagtgagtctggaaacaacagtgggagaggagaattagggcacagagatgacagctaggcctccagctctcagatgattcctttgagtcctcccaaggcctctacgacccccagatttaagctctcccgttaatcccccgacactctgcctggagtttcccctacaacactttcccgtggaagttcacctatgggctctccaagaaagcttccctattcctccttttctctccggaagttccctagacgccggaacgtccctaattcaacatctctccacaattcacttttagcctcctggaaatccccccatgactctccttagacttccaagagaaccccaaaagctcttttaagagctatcctcattaattccctcacgtcttccaacctcccccatgcaggtccctcaccgagtcctggctgctgcaggacacgacatggcggaggcggatctccggcatgtcaacgtcgtgggcttcgcctggccagaaggatgaggtagagtatggggtccgaggggcagggagagtgggagggggcggggtgcgccctgcgctggctaaagtgcgcaagcgcgcgaggctcgggcctttcaaaccccggcgcgccggcgccggcgtcgacactgcgcaagcccagtcgcgcctctccagagcgggaagagcgctgcgttccttagcaacgagcgtttcctccagccccgcctccctccgccacacacaaccccgctctagcctcgcctcccaatgacgtccgaaccctgctttctgggagcctagcaacagaagcgacctccgggattggtgtctggaagaaattcgcctttctcattgcacgatggagttaccgcccacactgaagccgagaaagcaaatctttttgctgtattattatttattttattttttaaaaattttttgttgagacagggtcttgctctctcacccaggatggagtgcagtggcacgatctcggctttctgcaacccctgtctcctggggccaagggatcctcccacttcagcctcctaagtagctgggattacacgcacgcgccaccacattcggctaatttttgtattttttgtggagacatggggtgagagggcggcgggtcttgccatgttgcccagactggtctcgaactcctcagctcaagcgatccacctgcctcggcctctcaaagtgctggaactacaggcgtgagcgactgcgctgggctaggacagcaaatctgagtgaattttcgtagtttcgtagggaacctggattctacgcaacaggatctcttcaaatggctcaggcggctgcactcttctctctgtccccttgccacacacacacacacgcacatatacatacatacgcgcgcgcgcacgcgcgaaaaaaattagcagatctctttcagccttatgcctgaggccaaaagagaagggttctgcgtcctaaatataacacaaagcatgtgcccaacccccaccacacacacacacacacacccctatcctggagttcttccacaaaagcctcagtttcccaatatgtggactgtgggcatctgtcttttactacgcccgcctatgactgccgacagacatccctctgttcattcggtgccttggagacccaagggtgcagccctgggtggggtcgcagctggagacagcccaaacacacaaggagtgtgagccgagcacatgaagagaggggaagggagacaaggcaccccgcacccgcaggaccagcctggacatgctgggtgctccaaggtggggccctacccacactgggtgcttccttgggaggagaggggaagagagagaaggagagggaatcccagttcttgcagccactgggaatcaagaggcccaactccgtcttggtcttcaagcaaacaaacaaacaacaatgggccgtgggaaggtgagaaaacagggtggtgactttctgggttctaatagaagagggggatggaagcccagactcctggggtctccatggaggtggggggctgggcacaagatgcccaggtcacttttggattctggttctgccttcccaacccggaggccacagaggactgccctgggttctgacctcagctatttctccccgtagggtgaatgtgggtccagacccacccctcctcagcttcctataaaagctggggaccaggtactgctgatacacacaccatgaggctctccaggagaccagagacctttctgctggcctttgtgttgctctgcaccctcctgggtcttggtaagtgacaagggacctgaactgtctctgggacctcaggaagagagaggtcccagattgagagagagagagatatagagagagaaagagccttcagcaagtcctcaaggtgaacggggaggcattctggaaattcagattcatggaagaggccaagggtaaaggaagagaaagcctgggggtcccagagaagaaaagctcctgtgattggatccctgagagaggggcttggtgggctctgaatcctccatcctccaggaaggatcccaaacacatctcaattctaggaaatcagatgagagcatggctggaaagggaaatctttaaaaatataattaaaaaaaaaaaaagagggagaaggccaggtgcggtggctcatgcctgtaaccccagcactttaagaggccgaggcaggtggatcacttgaggtcaggagttcaagaccagcctggccaacatggtgaaaccccgtctttactaaaaatacaaaaaaagttagctgagcttggtggtgggcgcctgtaatcctagctacttgggaggctgaggtgagaggattgcttgaaactgggaggcaaaggttgcagtgagccaagatcgtgccactgcactccccagcctgggtgacagagcaaaactccatctcaaaaaaaatacattaatatcatatgatatatttttttaaaagaggtagagagatttcctttctccttagactaagaagttcaggccccagccccctcctcccctgcacacaggagtccaagtaagcctcactttccccaggacccaggtttctgggcccctagctgtcccctctctcagaaccaagaagttcaagtcctctgccctcctggtcctcactctccctccttgacctgggatgcagaccctagcctcagggccccctgcctgagctcctgctgtctacaagacctacatggcaccttcaaggaggagaatcccacattcaagaaccagctggacctgaagtttcacaaaagtccatggaaacctccatcacgacccctccctgcccctgagctttctcagcggaccctggcatccaaaatccccagccatgtaattaggcaaacaggcttcatggtggagtcgcttcccgcccctggaagcagctttgctggcatcaccactgcttcttcgtccaactctggacagttccttgggcagtggtcaacatcccgcccatgaaaaaccagggagctgctggtccctcctctctcaggacacaaaagtcctaagtcaaagtcgtggtccgaagaccacaccacccatgactacagcctcgccctctgtctacactgcagggtgcccactacactgcgaaatatgtacggcggcggggagcaggtgccatggccaaatgaagacctgcagcagtgacaaggacacatgtgtgctcctggtcgggaaggctacttcaagtaagaggatgtggcctgggacctggtggggaggtggggtgtaccttcagggtggaagagactaccatgctgaggggggatcatcatggttctcaagacgggagcgtgggaagaaatcagtggagagcaggaaagagggaaagaccatcatgagatggagggaacagaaataagtggtgtgatagaaatcattattgtcacagaattctgaaaatgacactgtcctaaagagaaggaaaatgtgggaggggtgagagttaatagactttcttaggcagaagaggggtaaggaaagacactgtggggggcagagaaatagtgagaggggaagaatctaactggcaggaggtggaaatggtggggagtggatagagaaggaagaggctgggctggggtgggaaagtgtaagtgtaatcagggaagaggtcattcctgaccgagggaggagagatgatggtggagtgttggagtggtggaagagacagaaaagggatcaccccaaacaggagatggatgataaccttgaagtatggagcaaatcattttttttcttttttgagacagagtctcgctctgtcacccaggatggagtgcaatggcgcgatctctgctcactgcaacctccacttcccaggttcaagcgattctcctgcctcagcctcccgagtagctggaattacaggtgcgtgccaccacacctggctaatttttgtattttttagtagagacggggtttcgccatgttggccaggctggtctctaactcctgacctcaagtgattctcccgcctcgacctcccaaagtgctgggattacaggcatgagctaccgtgcctggctgagcaaatcatcgtaaagaggagaagcagagacagggagggggagatgtggatgagtaaaatgaaagggaggccgggcacggtggttcacgcctgtaatcccagcactttgggaggttgaggtgggaggatcgtttgagcccaggagtttgagaccagcctggacaacaaaaagagatccatctctacagaaaaaaaaaaaaaaaaatagttgcgcatggtggcacatgcctgtagtcccagccacttgggaggctgaggcaggaggatcacttgagcttaggagatcgaggctgcagcgagctaagtgcacaccgctgcactccagcctgggcaacagagggaaacctgtctcagaaaataaaatggaagagagaagatgggcatgagttaaatgaaagagaccaccccagacctgaaaaatgatggaggagaaagggagcaatggaagagaccagtgggggacagagatgtttatacaaagctgaaagagactttcaatcacaggaggagagatgatgaggcctggtgagggaataaaggcgactttgggtgcagggagaaaacactggtcgggagaggctgtgaaaggaaagtgagatcgaaaatcacccagccagcgttggtgggttaaggaaggacctgaaaggcttgaagagaacccccatcccggcatagaagaggaaacgcaccctcgggaagggaggagagagagctgggggacccctcgatggagtgaagggggaacctgtgaattgggtaggaagagaccaccacatggtggggagggggaaggccggggagactggaagaacccaccttaaacaagacctgaaaatagccaagaggggcagcaagagaccctcgttgggaggtctgaggagtgaccatggcaggatctgagagaggaggatgcctgttgctgggaccggggttcattggaagagactacggggtgggcgggggttggcggggagttgaggaggctggaagagaccatttcacgaaggcatgggggtggccataggcggcctgaaatagagtaatcccggaaggacagggagagaggggtggccgtgggtggggtggggtggggtggaagggaccacatccagcaggctgaggttggcaatggggagctggaagagaccaccaaaggccgactaggggctatggcagcgggagggagggctacctaagaaagcactccaggccatgcaccagacagatttggccgcatggc[137 bp omitted]accccgtctctattaaaaatacaaaaaaatagccgggcatggtggcggtcgcctgtgatcgcagctactcgggaggtggaggttgcagtgagccaagatcgcgccattgcactccagcctgggcaactccgtctaaaaaaaataagaaaagaaagaaaaaaaagaaagagaccatcccaggaagttgtggggttggggaggcctagggttaggcaagaccttgaggcaggggttgaagccagggagtggtcagccagcactgtccctgcctgtccccatcccacagagggcaaggagttggtgcacacctacaagggctgcatcaggtcccaggactgctactccggcgttatatccaccaccatgggccccaaggaccacatggtaaccagctccttctgctgccagagcgacggctgcaacagtgcctttttgtctggtaagaagcccgtggtgtgtggtgtgtgctctggctctccactgacccttgctgtagccacttgctggctctgagcctgtttccttacctgtaaaatgcagtgtctattagcaaccctggtgtttcccggggttgttgggaggttgggggaacggcttaaacatccctattcaccttacacttcatcctcatcctcagttcccttgaccaatcttactgagaatggcctgatgtgccccgcctgcactgcgagcttcagggacaaatgcatggggcccatgacccactgtactggaaaggaaaaccactgcgtctccttatctggacacgtgcaggctggtgagtggtgcctgaatctctggaaaaggaaacagaactagaggtccaaacttctaggttcgatgggaggagagggttccagagaagtgggtgaggatgtgttctgggattatgaggaagaaggggctgaggtccctgattccagtctgaaatctccctttcaggtattttcaaacccagatttgctatgcggggctgtgctacagagagtatgtgctttaccaagcctggtgctgaagtacccacaggcaccaatgtcctcttcctccatcatatagagtgcactcactccccctgaaaagctatctgaacagaggaagataatgtagtgtgaagtccccatttgtcctcagcctgtaactccccgtgtgcctataaagaagttaatagagcaagcctgagtccttgtggtgtgatgtatcttgatgagatagaatgcaggaaatagggggtctcaatcctcatttcaaatcccctccttttgaggaagagagggaaggccctgccttctttctttctttctttttcagacagggtctcactctgccacccaggctgaagtgcagtggtgcattcaaggctcactgcagcctcgacctcccgggctcaggtgattctctcacgtcagcctccctagtagctggcactacaggcatgcaccaccatgctcggtgattctcccacctcggcctccctagtagctgggactacaagcgtgcaccaccatgactggctaattttttaatttttttgtagcaacagggtttcaccacattgcccaggctggtcttgaactcctgggctcaagcgatccttggcctcccaaagtgctgggatgacaggtgtgagctaccatgcctggtggccctgccttttatgaagggattagtctttgccaggtccctgtgctgtgttttccatgctatacctcatttcatgatcataacaactgtgaggttgatattattatccccactctacagatgaacaaactgaggcatagattgtgggtgtcaaaatttgccttgggtcaaacaaccagggagggtcagaaccttgatttgaacccgagtctggtatacttcagagtccatgatcatctctctcaattaactgcttcctctttttgcctcagtgttcatgtctgcaaaatgtagatattaatagttataacctcataaggttgttgtaagagtcaaatgaaagacaacttaaaaagcgcttagtgcaatgcctagcaccacatgtggattctaaagacaatgtatgcctgagtaaacagtaatcatcataatagctgccacttactgagtggccattagttgacaggtgctaaacactgacatcaattgggacagactagatgttacagtaacaaaacaagtccctgatctcagtggtttaaaacaacaaagttgtattaa[132 bp omitted]gcctcaacctcatgggctgaatcgatcctccccgctcagcctccctggtagctgggactacaggcatgcgccaccatgcccagctatttcctgtaatttttttgtagagacagggtttccccatgttacccaggctggtctcaaactcctgggttcaagtgatccacccacctcggcctcccaacatgaaaactgagacttataccaacaagcattcttctaagggtttgtgggatggctgctttggctccagttcgggaggattcaggtctcttccatgagattccacaattttctgggatcagcagctccctcgcaaatgttctcatggcacatcacgggagcacaaaagccaagtgcacttaagggccttgctaaggttaggtctgctaaaattccattaagtaaatcatatggtgaaacccatcagtggagcagggaaatatactccccctccagtagaagggagaggagtggatatttgctgaatgactgcccattcacaaaaggtaaacttttccttcaccctagcactatccagagggtgttttcctcgtcatagtcataaatcagccaccggcagggcacgatggctcacgcctgtcattccagcactttgggaagccgaggcaggaggaccacttgagcccaggaatttgagaccagtctgggcaacatggcaaaaccctgtctctacaaaaatacaaaaaaaaaaaaaaaaaaaaaaattagccaggcgtggtggtgcacgcctgtagtcccagccacctgggaggctgaggcgggaggattgcttgagtccgggaggcggaggccacagtgagccgagatcttgccactgcactccagcctgggtgacagagtgagaccctgtcttaaataaataaataaataaagcatccaccaacttgaatgtggccaatttctgtgtcacaggaagtctaccatgggtaatcacatgctgtgacataatacaagtcactggatggagctagtcacatggcccacccagccacatgggcaccaggaagtgagatcctgccccaaggtcagaaggcagagaactggacatgtttcattaatagcacaaatgaccaccatgaccccttaagaagctgtttttcattttattttcacaactctatgtcataggcactattattcacatctctgttttcaggagacatcagaggctcagaaggctgtcacattggcagtcacacagctaaaaagtggcagaatttaagattttaatcattgggtcatgttgttggggagaaagagaccacatcacacacagagagaacaagtctgtattagttgcttttgctacataacaaaccactccaaaatttagtggtttagaacaatcacctatttagttaatgattctctgggttgcaacttggtctgggatcagctgggcagttcttttgctggtctcagctgggttcagctgcctatcagctagggagctctgtttcagaggttggttggctatgggtggcagggatcaaggatgacggagccatgtgtctcttttccctttattacccagcaggttagcccagatcttttccttttctttccttctttttatttttttagacattgtcttgctctgtcacccaggctggagtgcagtggagccatcatagctcacttcagcctcgacttcctgggctcaaacaatccacttgcctcagcctcccccatgtagttgggaccacaggtgcacaccaccacatctggctaattctgttgttgttgcttttttgtagagatgggggtcttgccatgttgctcaggctagtctcgatctcctgggctcatgaaattcttccacctttgcctccctaagtgctgggattatgggtttatacccatatgccaccatgctcagccagcccggggtttggatgtggcagtggtggtaggggtcccaaggggagcaagagaggaagtcccagtgcataagcactttggttttttttttttgagagaagtctcgctctgttgcccaggctggagtgcagcggcgcagtctcagctcactacaacctccgcctcccaggttcaagctattctcctgcctcagcctcccgagtagctgggactacaggtgtgcaccaccacacccagctaattttttgtatttttagtagagagacggggtttcactgtgttagccaggatggtctcgatctcctgaccttgtgatctgcccgccctggcctcccaaagtgctgggattataggtgtgagccaccacacccggccgcataagcactttccaagcctctgcttgtatcatgtttgctattgttctagtggctgaagcaaaccacatagtcaaacctagaaggagagcaacaatccaagggcatggctacagaaaggctggcccagttggggtcattaatgggtatacctggctccagaactaaggcgctttaccatcataagctcccaatgtttaaacagtaagtctgcccgcactccttccagggtggaaaaactcagatactgataaattctcttgatcacagcccagtttttcccagcggattccccaccatccctcctatccccagacgctggagtctaggtttccagcccagtcaaaatctcaaggatctttcttttccctcaaactccaaaagaacagacacgcaataggatttctattcatttttattcattcctccaaagagcaccacaggccaaccacacccttgatgtgtccttcatggttccccactgcagtggacacaaatccctccatcattatccaggcatggatggaactctgctgtggtgaggaggttgtctcgcccactcacccaagttttccatgcctgttctgcttttgatggcaatgccaaaattcatcatacatttccttgaattcctgccttcaagggtcttccagccctgtggtgccatgcagacacacttcagtggcggccagtgatctgtctacaagggagtcttagtcttttctgcttggatgctcccagggacagatgcctgccaacaaccttatgtcttcacaaagactaaaatggaatcccattaaaagttatgatttaaaaggcgaccacccccaaaagaagtcataacactcaagggtgtcaatatatacaactgtgtaaacacaaccaatctacaactatatcaacacaaccagcactcctctatgggcacagacacacacacaaaattgtcttgctttctcagatatgatctctggcatgactcctgctggcatgagggcagaggaaattgagaggagcaaagcatatagcagtgatgtcagacaggaccaaatcagagacagggtcaaagtggcagaaaaatgaggagcacactccgagcaaaggcatgggggtgagacaaaggcacccagactagagccatcttggtgctgcccaggggtgggtggcactcatgtttgagctccatgtgtcaggcttttcaggaaagggtgtactatgttatgtgtctgtgtgcatattgtgtgcctgcatgtacatacatacgctgaattctcaccataaccatgtgaggtagatgccatttgtagagtgacttgcccaagtcagtggaaggactatctgcccctagagctagactgatagaattttctatgttgatggaagtattctgtaccttccctgtccaataccatagccactaatcacatgtggctactcagtattaatgttgcactactgccaatgaaacatagaattttaagttgtatttacttttaattgaacagctgaggccaggtgtggtggcccatgcctgtaataccagcactttgggaggccgaggtgggcggatcacctgaggtcagcagttcaagaccagcatgcccaacatggtgaaaccccgtctctgagaaaaataccaaaattagccaggcatggtggcatacacctgtagtcccagctactcaggaggatgatgcaagagaatcagttgaacctgggaggcagaggttgcagtgagctgaggtcatgccactgcactccagcctgggtgacaaagtgagactctgtctcaaaacaaaacaaaacaacccagcaacttggtcaacataaccagacctgcatctttacttaaaaaaaaaatggacacccatctcagtttttggaaaactattatataattggaacaacttggatatgtgaatctacttctccaactatgaattttatgaaatcaaaataaaggtcaagcatttcagataaaaatgtaccatggtaattgagatttggtgtaagtgtaaaatatataacagattttgaagacagcacaaaagaacgtaacataattcatttaaataataccgatgacgccaggcacggtgcctcacgcctgtaatcctagcactttgggaggccgaggtgggtggatcacctgaggtcaggagtttgagactagcctggccaacatggcgaaaccccatctctaaccaaaaatacaaaaattagtgggcatggtggcgggtgcctgtaatcccagctactcgggaggctgaggcaggagaatcacttgaacctggaaggtggaggttgcagtgagccgagattgtgccactgcactccagcctgggcaacaaagcgaagcactatctcaaaaaaaaaaaaaactaaaaaaccgatgacatgttgaaatgctattttggatacattgggttaagtaaaacatgttaaaatgaatttaacctgtttccttttacttgtctaatgtggctattagaaaacttggcttactcagcactttgggaggctgaggtgggcagataacttgaggccatgagttccagaccagcttagccaacatggtgaaaccccatctctactaaaaatacaaaaattaggacgggtgcagtggctcacgcctataatcccagcactttgggaggctgaggccggtggatcacctgaggtcaggagttcaagaccagcctggccaacacagtgaaaccccatctctactaaaaatacaaaaattagctgggcatgatggtgcatgcctgtaatcccagctacttgggaggctgaggttgcagtgagccaagatcgcacaactgcactccagcctgggtgacagagcaagactccgtctcccaaaaaataaataaataaataaaataaaaatacaaaaattagctgggcgcggtggctcatgcctgtaatcccagcactttgggaggccaaggcgggtggcctgaggtcagtagttccagaccagcctgatcaacatggtgaaaccccatctctactaaaaatacaaaaattagccaggcatggtggcatatgcctgtaatcccagctactcaggaggctgaggcaggagaatcacatgaacctgggaggcggaggttgcagtgaggcgagatcgtgccactgcactccagcctgggtgatggagtgaaactccatctcaaaaaaagaaaacttaaaatgacatatgtggcttgcatttcgtttctactggacagtgctgccctgcagccctcccattccatcacgtggctgacatgcctgattgcagggcttagacactaatatgatggggtaaagatatggatgaatattcttccccaaagctgaaagagctttcatgaaaatgcctggagccattcagtatagaactaagtgctcttccccatggtagctatctcaactttgaagggacaaattttgtcagcagtgggagtccaagctggagatgatggtaccatcccttgtctgcccttggatcagttacctttgtcttcagcttttaagggagacaggatctcaaaactaaggttcttatccagctcttttatttcacagatgggaaaataaggcactgtccaagtaacacacagtgacagtggcaaagtcgtgcttgcttcccaggtccctgacctcagacaagggtgttctctcccattaaatgcttttttctcctcatcttgctccattttcctatcttgtggcaagagattaacaatctaaattccaatcctagttctgacactgaccaatgaaataaacatttaggctgggtgtggtggctcacacctgtaatcccatcaaggcaggaggatcacttgaggccaggagttcaacactagtgtgggctacaaagcaagacccccgtctctacagaaaatttggtgctgtgtacctatagtcccagctactctgtaggcggaggtgggaggatcgtttgagcccaggagttggagatggcagtgagccatgatcatcccactgtattccagccggggcaacagagcaagaccctgtctctaaaataataataataataataaatatttacgaagcacctattgtgtcaggcacctattgttctagatgctggggaaacaacagagaacaggacaggcaacgggtcaaaagccaataaacaggtaaataaataagatcatttttgacagtaataattgctacaaggaaactcaactggccgaaatgaatagtgggggaatgtgagctacttcagatagggtggtcagggaggggaagtcctctctgaggggatacgtgagctgagatctgactgagcccgtcacaggaaggtttgagagtagaacaggaagttgtgagtagagccttgaaggaaagagaacagcaggtgcatgggtccccaggcaggactcaaggtagccactcaggcatcagaaagagtcaggcggccatgatggctcacacctgtaatcccagcactttgggagtctgagtcgggtggatcacctgaggtcaggagttcgagaccagcctgaccaacagggtgaaatcccttctctactaaactacaaaaattagccaggtgtggtggcacatgcctgtcatctcagctacagtcatcacatccctgtactccagactgggtgacaaggtgagactccatttcaaaaaaaaaaagaaggaaagtctatcaggctggacaggagtgggaaggggcagtgaatgagaataggcaagggccagacccacagggccttactgtgtgctgttgggcctcaagcctgccctctctggactttgctctttctgtctacgacaaaagggattctatcgcttggattctcagatcctccttttctgtttttgacactgaagaattctgtaacctgcaacttttcccccacatgtggctagcagcctagaacattccaggcactgtggtttctgcctttgcttcattcactcctggcatattcccatggtctcaagtgcctgaccacccatttggtgggcccctggctcaatgcagcaccctctatgtacatcagaaagcagagcctcttggggatacccgaggtgtccatacagaagtgtttggaccagtgcagcagtacagctgctcttctgaaaaggaaggtgcacaaaacaccaaggccataaagggttatggttaaataccaggagaaaaaggccaaaaaaagatagaaactcctaaagaaaagagacagagaaacagactccccagagatcacctgaattgctcagcacctagaagatgaaggcagtcatatcccttcccagtcacactcacagaggcagttgccgggatcccaatacaaggtttggaggagctgtctctgaggtatgctttactgcccttccacacccaaaagacctcattcctggtccctggctactcccagagcccaccatgcccagacctcttacccacctcacctcatttttgtgggaccaccctccctacatgcttttggagggcaattatagaaacccatccactccccaggagagatcaagaagtctccagctttctcgcacaagcccccgatccctcctccagatgcagacctccccttacccaatatttaggaaccaaggtccacagccatcttagaaccccggaagtctcagaccccaggggcctccgccaccccatcaagattcaaagcccactgctccttggggacctgtgtgcaggctttttctcccagagaaatgtagaccctgtttccctctgaggctctgaagcccaagagttccagctccctggggcgctcaggtctccctcccctatactggagttcaggtcccagtcatggacacctccccaccaattaggaaacaggacttctaccagcctccctggaggactaaacatccagtaactccagtttctactccctaggagacaaagacatagtccctgctagagtctgggccaccaactcccttcaggacagaagggtctagatgtcattcaccatggttcccaaaggtatcaggattcctggccaggggcggtggctcacgcctgtaatcctagcactttgggaggccg[134 bp omitted]gaggcaggagaatcgcttgaacccgggaggcggaggttgcagtgagccgaggtcgcgccattgcactccagcctgggcaacaagagacttcgtctcacaaaaaaaagaaaaaaaaaaaaaaaaatcaggattcctgtcccccagactctctgaatccaggtgataagaagtcacacatcccagctggaagtcaagagtccacatccccttcaagcacccaggattaagcccaggcatcccctgtcagagtctggactcccaagccccctcccactcctcactgggcaggctcagggggtgccagcacagcctcagcatcagcccgcatctcatcgagagcctgcagcaggacgccgtgagccgctcggtagcccaggccacctgtcgccgctgcaccacccgcaggccacaggaaggagagagcccccagtgctgcgcccccagcagtgccctcgcccgcccaggcgcccagtcttgcttccacctcggcgcgcgtcaccgggcctgggaaatgagcgcgcgctgccagctctccagaagccaggcccagggcacgctcacgtcgagccagtgccgtgggttccagccccaggccccgtcgccactccgccagctgaccccgcagaagtgccacgtcgcatgcccagcccagccctgggagtggtgccgccgccgccgccagactagccagcagagctggcctccacgccccggctcgcaacgccgcagccttggttcgggcagcgctgggagatgctggtggcaacgccagcagcagtgcccctgcctgggctggggggagcgctcgccgcagccattcgcatagccctgggagtccgccaggccgtagggggaacactggcggcggcgcctcctccagcacctcccacgtctcgtcctccgggcttaacgcagcggcccgctctgagtcgccaccacctgatttcttcatgccgacaacctgctgcaaaccctcgctgccagctttcccaggaccttccccgctgcctgctttctgcgatccagcgctacatttctcccttcccttactgagtgcattctccaatccccctccacctgcgttctttaagctctcgcccttgggattctccatcttgccttctcccagacactccggatcctcgccctcgccgtctgtgcgcacgcagacaagaggcgcatctggtagcagcaaggcctggacctgggcccagtccttctcagtgggggccccaggggtgacgaggatgagggcgtcgtagtgcgttgggtgagaggcggcggccgcggtggtggcagtgcccgtgtggcccagaggcacggtccagagcaccacattcgggcgctctggggctgggaagggagtgggtgctgtggggaccgaagcaggcgcagcgcctgggtcgccaggatccaatccaagcagcatgtccaccacaaggcccacgtcagccttgccagccacggccaggtctagccgtgcgctgcccaggcgctccaggcctgagcgcacccacgacagcgcagcctcaaggccgccggtctcaaaggcctcacgcacagcctctagctctgctgcacccaacacctcgaagccatcctgcgccggtggcaggagcctgtggggacaagaagggacagggtcaaaggtagaagaggggctgggtgacatggactgggctatgatgacaagggcagagctttcctaatgatcccagaatggggcaggggtaggaaagggaagggccagactgatggcacagcaaatagaaaccagatagggagaggcagtgatgatatgggtggggcttcaagcaataatggagtcttgattattggacgggtggacataaggtcaggtttcccaccccagcctaaaatggggattgggctaaaacttccatggaatacagtatttgggggcggggtttttccaagggtcggctgtgctgggtgggacaaagctcacagagggtggggcctagaacaaagaatcgcaactgtattgtggcctaaacacaagtccagcactatttgagacaaggtccccaagggcactcttttcaggggctgggcctaaggagggtcagtgaggggagaaatctcatctaccagttcttaccaagggggagtggctaaggtgactcccgggcaggtgaggctaaggaaaaaagatgacagtgtactgggacaagggactgtccctctctgagcctcgttttaaagtctttaaaatgaggaggctggcaggtggtagagcaaatccaggaggtagccagcaagtgggcacagaaacaagagggagctggagaaaggaggtagatgaggatgccccaaaataataaagctcattgcgggtgtggctttaggtgcttgaaaacaaaactgatggtggggagggctcaaagattagagttttcaggtaaaatcttccagggggctgggcagagagtctcacgactgtaatcccagcactttgggaggccaaggagggtggatcaccttggtgggggcagggcctggaaaaaggagcctcagggccccagcagataaagtgttaagcctttcccttttaattctagggctttgggaagcctgggtgggggcatggcttgaggccaagagttcaagaccagcctggggaaacagtgagatgctgttttgcagcctgtagtattagctactctggaggctgaggcaggaggatcatttgagcccaggaggtggaggccgtcagtgagctaggatcgcggcactgcactccagcctgggcgacagagtgagaacctgtctcaaaaaaaaaggccgggtgtggtggttcacgcctgtaatcctagcactttgggaggctgaggcgggagtattgcttaaggccaggagttcaaattcaacctagccaacatagcgagaccctgtctctcaggaaaaaaaaaaaaataataataatagagctaagccttgccccaaactcactgggggagggatctcatggacctccatggtcgcacctaggtgcctagggtctcgactaacggacccagccagaaagccggcactcacctccgcagcgcttctgcctggctctgcagcgccgcccggaggcgctctagctcctcgcagccgtcgctgctgccgcagttcgccggtagcacaaacagatccgcagctcctaaccccgcgctgttcagcagagctgctgtctgatcacgggcctgggcggcagtctgtgaatccccaggacggaggttccgcacagccagtagcggggtccctcgggccagggcggccagcgctgcctctcccagggctggagccaacggttccccgttcccctcgggtccgggcagcaccagtaccagcacgttggcttccgccgcccagggccccggcgctgcgggtgggcagctcagctcgcccagaaaaaggcctgggcccgcagctcttaggctgggaaccccggagtccggccgtccctcgggggcctcgagcgtctccacatccttgtcgcacagcgctgcgatcagcgcggacttccccaagcccggaggccccaggaacaaggcggtcacgtcaccctgcggcggaggcatggctggaaagcaacgggtagagaagacctgggtcagggagcacctagccttttcctttcctagccgccccactcggaacccaggcctcagtccttcaccctgtccccttcggttcttgagtgtcactctccaggacctaaaaaatccagagcccagaccctattcccccagaatcccaggcgtcctgtctgtccgccctccctctagatggaaacgtttccctttctgcttcaaaaactctgaaatcaggcgcggtggctcatgcctgtaatcccagtgctttgggaggccgaggccggaggatcgcttgaggccaggaattcgagaccagcctggccaacatgtggggggactctctggtagagtctccgtctcgataaaaaataaaatttagccgggcatggtggtgtgcgcctgtagccccagctactcggaaggctgcggcgggaggatcgcttgagcccaggacttggaggctgcagtgggccgtgatcacaccaccgcactccagcccaggcgacagagcaagaccctctctgaaaaataaataaaaataaaacctcagaaatctggcttccagtccctcctccctcggacacattgttattttcatctttccccttcccccttccaaatcaccaaccgagcaaaaagccgacccacgggagagagcgcagtcggtggcagtaggtcagcagctgagaagcccggcccctgggccgcggcggacggaggccgaagaggccagggagcggtgatttagagatgccgggacccgtcccggtagctttaacctgacgtcactccctctcccaagggggtgtgtcttggaaggccgacagcagagacccagcccttcgccgcgcctgcgcagaacggccgaagtgtgcacgcccctctttggcggcctcagggcctagaacaatgaatgagtcaacgcgcctgcgcgccacgagagcctacccacgcatgcgcaaaaggcttagctagctaagccgcgggaggctgaacgtcatcaaacgcgccatagggcagagaaggacccctcccgttattttgaggaccgggctggtgcgactatactactgccggatggcaaatccgggatctcggctccgagaggctcatctggcaaaagggcgcggaaaccacgggggccctgagactgagtggtccctatcccacttctctctggggcggcgctgtagccagcggctgacaggcgcagcgaaaggcagccctctgctgtaaggaggaaaactgaggcctgggagcaggaacctgtaggcagcgcttgagggtagcgggatagcagctgcaagcgcgcgtgggaggcgggggctctgggcggaacaaaaatcacaggatgtcagaggatgtttcccgggaagaactgggataaagggtgggtatcactacctgccccaagacacttgagattgggatgacgctggtgtcaaagatcaaggcttccacgctgagttcagggagttagtttgatgcagcaggtcataggtcacaccagtgagaagactctaggggagtcccaaacccaggaaatccagtcctttgggaggtttgaagcttcttttagcaagaactccatcaattagagttcaaggagatagtatgtcgtaggggtcaaaggcaggcaaggagagcctctggcgatgtcaaaggtcatagacttagggtgccctctaagactggtaacagatgaacagcttcacttatgcacgctcctctcctgactagaagggtcccagcaccatggaggacccgaaccctgaagagaacatgaagcagcaggattcacccaaggagagaagtccccagagcccaggaggcaacatctgtgagtacacatggctggcgggctagaggagggtggggtgcaggagctgatgctaagatctctgtggcacttcggtgtccaaggcgccacagagttttgcctgttgagaaggggctgtaatggtccctgagctgctctagcaggaagtgcatctcctcacaccagcttatgtggccagagtactcaccctcctctggccacataagcaggattgcaatgcttatgcattcagagggatagggtggcttccaggagaggcttgggttggagatgtggctgggaatggttctattgggagagaaaccccaagattctggtcccaactctgccctagactttcagtgtaacttgggccttggtttccttgactgtcaaaagagggtggtacttcccacctcacagggtgggtatgggattaactgcagcaaaggggaaagctaggggttaatgatggtagccagtttgacatgtaatagcaacacctcctgctcagtgttttattatgagctaggtgtatttattctcatattatgaaccattttaacattcattatctcattgagtccttctaataataggccctttaaactgggaactgaggcagagagaggtatttgtaacaagagctgtagtctcaatgcccttgagccagagactaccaggaacacacctgcagttgaacacgttgggtttctcactgcaatgaacacagaccatggggggactgtggggtgtctcactaagaatggtaaaaacgacacaggatttgggcttgtgggtggtgattttggggaaggttcaagcaaaattgttttgctctggattggatgctaccaggaagcaggggcaattctatgattggctatcgtaataaatcttacccagaaggaggaaggaaggaggcgaggctcaagctctgactgataaagcagcagcagacattcacattagccaggataggaggatgtttggtcatttttctgcttggacagtattcatattttgtctgtgctcagacattatgatgatgtagtcttgtcttgattcattttagtcacagcgtggccttgtctgtccttgatattctgtgaaaatttatgttcaacagaacaccaaggtctagctgtgagtaccaggccagatcctggatgtcgggctggatttctctgtatcattagtcataattgcaaatgactgtacagcaattcatttattccttccaacggtcctatggagtagatactgttattagcccattttccagataaggaaactggtgtaattgcctaggaagtggtggaggtgagattcaatcccaagcagtctggctccaaaggctgtgctgtaatcaccatacccctctgttgggcaggctgactctctgggttccaaccctggctccaccatttcctttcctagcctcatgactatgggcaacttgcctaacctctttgaatctcagtttgctcatccataaaataggtgcaagaacagttctcctgtttggttgtccagcattagcatagaacctagcacataacacattcaatgttaattgttggtgtgattctggggttcaggaagaggtcttggagactcctgctggcctcccctgacctctcccccacattcctcaggccacctgggggccccgaagtgcacccgctgcctcatcaccttcgcagattccaagttccaggagcgtcacatgaagcgggagcacccagcggacttcgtggcccagaagctgcagggggtcctcttcatctgcttcacctgcgcccgctccttcccctcctccaaagccctaatcacccaccagcgcagccacggtccagccgccaagcccaccctgccggttgcaaccactactgcccagcccaccttcccttgtcctgactgtggcaagacctttgggcaggctgtttctctgaggcggcaccgccagatgcatgaggtccgtgcccctcctggcaccttcgcctgcacagagtgcggtcaggactttgctcaggaagcagggctgcatcaacactacattcggcatgcccggggggagctctgagtgcagcttaagcctctccacggtgacgggtggctctgtggctggtaggactcacccatgatatggggtgcaggaactctgggggccctgaaggatttgcttccctcccctgggaaggcagagggctcttaataaagaggacccagaagattcttatttagagcttcagtctttggagcacacagggccttcgtgagacagtgaaatcagataataatgagatcttttgttaaaaaaaaaaaatgggaagggagtgcgggagagaaatggtttgtgtctcccttattcccagttaaatacctagctgcagattgtgccatcacccttcattcttcccagatggatgccatgggctatgggagcaaattgccctggacctttgcctgaatgggggcaggaaaggtgaggtgttgctggcctgtaatgccaccaggtgagttccagatgtggagcaacttgggcttttggggatggggcagcaaagttgggagctggaccccaattgagtgggggtagcaattggagtccttgtgtctcttttccaccccctgccatcctcacttagaggggccatggcactagatggcactagtcccccgataatttatgtctcgttgaaataattttgtatatcattctagtcctgaaatatttttttcatatgtgtaggtgaaatggtatgaataagctaacaggaatagtatctaaaaacagaaaacatccatattaaaatgtctaaacagggagctctggcttttgagtgggaatttccagagaacataagggtgtgggcaggtgggggaactcaggccagagttggcctcgctttgtggggaaactggtttggaatcaaacagagataccttctgtttcgggttttatttggccaacactgggagatttcccattaagatcctattttcagctctcttgaaaggcccaacctaggctgacattgtcagcaggggcaggacagaagttacaacaggctggagggagcagtgggtgtcaccctcaactggagatgagtcccaccaggccagttttacccccttagttacctgccctgcacctgcagacaatggtcgatgccttgcatataatacttatagactctgtttatgttgagggatgtttttaaagcccacaggtgaggtggatgtggtagactgatcactgtctctgtttttagctaggcacacagtagctgaaaagactgcatttcccagattcctttgcagctagatgtggccttgtgactgatttctggctaaattcctgggtagaacagtcaagcttaagaaagggacggctgggcacagtggctcacgcctgtaatcccagcactttgtgaggctgaggccggtggatcacctgaggtcaggagtttgagaccagcctggccaacatggtgaaaccctgtctctaccaaaaatacaaaaattagccgggtgtggtggcatatgcctgtaatcccagctacttgggaggctgaggcaggagaattgcttgaacctgggagacaggttgcagtgagccaagatcgtgccattgcacttcagcctgggtgacagagtgagactgtttaaaaaaaaagaaaagaaagggacataccttttttccaccttcctaactgtaatacggaaatggtatccagccatctcagaccataaggataagagcaacacgtgggaagacagagcaacaagataggagcctgggtctctcgtcaatttcaaggagcacagccaccataccagcccacttccatattgctatctaagaaagaaacttctatcttatttaagccaccattattttgggtctctgtcacatgcaacagaatttacagcctaagacaggggtctgcaaactatggccaactctagcctgctgcctggttttgcaaataaaattttatttgaacagttttatactcattcacttatgtatcgttgatggctgcttttgcctagaacagcagatctgcatagttgcaacagagattttaaggcctacagaacttaaaatagttaccatctagccctttacaggagaagtttgccaacccctggtctaataagacattcaacctactctgagtctggaagcagaaatttccatcctgggaaccaccatctttaccaggtaggtaggtaggtagggtatgtgtgtgtgtgtgtgttttggggcagggctaccctggatctctttgctggggtgacttatggggagactggttggagttagtagaccatcagtttttttcaagataccaacttcatgaagagccagatatttcctctggctcctggtgaatgctccgaagtttccaacccagatattgtcacactacccccacagtggctcccctaaaccaaacctaagtatctaatcccacatgctctcccaagatagcagcctgcccaagtacaccctgggcttcctgttctctccagacatcacagattctctaaatagcatcactgatgacatccacatctttatctgcagcccaaaccccagacataagatataaccacttgaataaacaaatggagatctcaaacttaaaatgggtcaacaggactcctgcggcccaacctgcaccaccattgccatcatgttagtaaactgtgcactcttaaattcttttttcttttttgagtctcactttgtctcccaggctggagtgcagtggtgtgatctcagctcactgaagcctccgcctcctggattcaggcaattttccagcccc[132 bp omitted]gcctgggcctcccaaagtgctgggattataggtgtgagccactgcacctggccttcattttttttttttttttttttttccccttcagacagggtctcgctgtgtagcccaggatagagtgcagtggtaagatcttggctcactgcagccttgatctcctcaggctcagatgatcctcccacctccacctccctccctgtagctgggactacaggtgtgcactactatgaacagctaattttttgtagagatggagtttcaccatgttgttcaggctggtcttgaactcctcggctcaaacaatccgcccacctcgatctcccaaagtgctaggattacaggcgtgagccaccgtgcctggctgactttcagccttctaacacctgtgtaactattccctgtattaaatcctctttggggaatgcctggcctgactccatatcctgaatgggtgctggctgaatgacccaactcctgattgatagtgcctcttgtgatccttaggaatatttgccaatggatggaaattctctatatttgtccttagaagtcctgtcttatggcagaagacaggatggggtgctgctccaggaaacaaaacctatgatcacacttatccatgtgctatagttgaatgtatgtgtccccctaatattcatatgttgggaacctaagaccccatgtgatagtattcagacatggggcctttaggagatggttaagtcacaggggctctgccctcatgaacaagataagtgcccttagaaaaggacccaagggaagtagctaggccttctccccttccatctctcctaccatctgaggacacagcattcatccctttctgccaccttccactgtgtaaggatgcagcaagaaggcaccaacttggaagcagagagcaacccttaattagacaccaaatctgctggttccctgacctgggacttaaccactctccagaactatgaggaattaacctttgctctttatgaattacccagtctcaggtattttgttacagccgcacaaacggactaagactctgttgttttaatgagcctggaatttctgctgatgattctgaggttccatgatgctaagctatagtggctaggaaagtctcagttcagagtgtatcaatgtcaggtttggagattctgggatgagaaacgtgggttttgaaaaatgctttggtctgaaatcctgtaataggtgtcaaaaatgtaaatgctggccaggcacggtggctcacgcctgtaatcccagcactctgggaggccaaggcgggcggatcatttgaggtcaggagttcgagaccagcctggccaacatggtgaaactgcatctctactaaaaatacaaaaattagccgggggtggtagtaccgcgcctgtggtcccagctactcagaaggctgaggcatgagaatcgcttgaacccagaatgcagaggctgcagtgagctgagatcatgtccactacactccagcctgggcgacagagcgagactccgtctcaaaaaaaaaaaaaaaaaaaaaaaaagcagatgctcttcagggccaagcaggcagggtaggggtgtccagatgtgaggcattggtgactgggcacataagagtgaatgcctcccctacagaaagtgactccttctcagcaccaacaaaccactatccccatgggaactgggggttcagcaatatagatctcacaattttcgagacagtccagaaacttcaatttttttaaatgtgaaattacccatttttcaacattggtaaccaacgtaacttaaaaaaattcaatagctctgtggagaccagatacactcctctaagtcagatggtggctgtgggcactagactgccatttctggtgtgtggcttagtggttaagagtggatgcacctgcatccagttgtctgggtacaaaccagggctctgctgcttactggctttgtgacctctggcaggtaactcaacctccctgtgcctctgttgtagcagatttttttttttttttggagacggagtcttgctctattgcccaggctggagtgcagtggtgcaatctgggctcactgcaacctccgcctcccaggtacgagcgattctcctgcctcagcctcccaagtagctgggacaacaggcacgcaccaccacactcagctaagtttttgtatttttagtagagatggggtttcaccatgttggccaggctggtctcaaactcccgacctcaggcaatccacctgccttggcctcccaagctgctgagattacaggcatgagcaaccatgcctggcctgttgtagcagttataaaatagtcataaaggtagcctctaaggattattatgagcactcagattactgtgaggactcagacttggagacaatgccaaagtcagtatatggctcttacggcctggttctccgctactttctgacctcacctcttacctgtcttcctcagttccagcctcgtggccctgtgttctcttcccaagcaccccaagtgggctcccacctcgggccattgcatttactgtccccacagacagccacaaggctcactcctgccccttctctaggtctctgctctgatgtcatctcagtgaagccttccttgaccaccctacttaaaactgcaaccttcacacacacaagcttcccaccctgttcctttttctccatagcactta[143 bp omitted]gcctctccgagtagctgggactacaggtgcccgccaccatgcccagctaattttttatattttt[133 bp omitted]tgattactgtcttccccattataacctccacaaagggagggggtttttgttcattgtgttgactgctatatttccaactcccagagcagtgcctgccatctcataggtgctcaataaatcattgttgggtgaatgagtaaacaagtaacagtccctaacttgtaaggatctgatgtgactgtccacataaagcactgagcccagggcctggtccaccgtgagcgctgacttaatgatggccattacagtaattcaggttctattcttgaaggttcttagtctccaaccttctatgagttaacacatgtaaagcgccttagaacagggctggttgcccagtaaattctcagtaaatgatagctattattataattaggcttctattttcaaagtagcttcggcgccaagcttctgtgaattacgaattagtacttcccatctctgagcccaagttttggcaaggctgtaaagagctggtcctttgctaccctttgacctcatccctacagctctcgcctccttggcacaccaggcaggctcctgcctcctccagcctgaagtgctcttccccattgatgtacatggctccccccggcttcagatctgtcaccttctcagggaggactatactctttaaaattgcaacctccttccagaacagttctcccttcagtccttttttaaatttttttcttgcaacaaattcctgccatcatccaggctagagtgcagtgagcacagtggcacaattacaggccactccagcctcaacctccaagcctcaagtgatcctgaatagctgggaccataggcatgcaccaccaagcccagctaatttaattttttgtagatggggtctcactgtgttgcccaggctggccttcaactcctgggctcaagaaatcttcccacctcggcctcccaaagtgctggaattataggtgtgagccactgcacctggccttccttcagttttttttttgtgtgtgtgtgtgtgtgtgtggtttttttttgagacagggtctcactgttgcccaggctggagtgcagcgacacttcttaggctccagcaatcctcccacctaagcctccctagtactaggactatagccgtgtaccatcgttagcccagctaattttttgtattttgtagagatggggttttggcatgctgcccaggctggtctcaaactcctgggctcaagcgatccacccacctcagtgctgggatttcaggagtgagccaccatgccgggcctcctttcagtgctttattgttctcacagcatttatcagcacccggcatatgctgtatcttacttgtttatgtctgtcttcaccagcagcctctacccactcccatgtaagctccatgaggacaacgattttattttattcactgctgtgttcccaatgcttagcacacagcaggtactcaaaaatatttgttaaatgaattaatggatcacaatccctgtctcacagggttattctaagaagctgataatctcatgcaaattaagtacagcactctgtaagtgctgggaaaatggcagctgcaattatcattaaggttctatttttgtaagttcctagatgcaccatttctatgagtcaatatatataaagcccttggactggcaccagatacccaggaagcgctgagaaagcgtagctgtgattataattaaagtcctctttgtggaagttcctaggctatgtggcagaaagccctagctgtcctccatgaactgttttctgctttctgggcgcttggctagactgcttctcccaggttgtttttgcagttagctgcggccacatatctaatttctcagcaaaggcgtgtcaatggaagcagtgtgtgcccctggcaggccagggcttgtaagacaacacgtgcacctcaccaggcatcctgtcctcttctgccagcaggacccaggctatggccacccagtctggaccatgggggagacaacaggcttaagggatggcctgggtccccaaatgactcacccagcaccattttgtgagtgagaaacaaaattctattattagagcctttacattatggggtctgtaagtaaatacatggaaacctcatcgaatacaagcacgcagtaaatgttatctttcccaaaagaccccaaggttccccaagaaggagcccagggggaatacacacacacacacacacacacaaacacacacacgggcgggaatacacacacacacacacacactctgaaccaacacacacagatacagattttggcttttattctggccatcacacatctacttctaagacaacacagaccggcagtaccccatcccccatgaccactgtcacaaccccaatttcctcagccccctcctcccaccccaccccttctgccaagctccccgtatgggggctctgcctacacctcaccccgggcatgcagcatgaagtgcccgtgcagctcccccaggttgtcgaaggaatcctcacattccgtacagtggtaggttccctcctcctcctcttcctcctcctcctcccgcccagctggtcggccctccccagcccgaggtggttcctcctcttcctccccgagggccctgccttcaggggctggtgcttcctggggggctgtagcagggcagcagagccggcagggtggggttcccggtggggcctccccaaggggtgagcggccacagagctggcaaggctgggccgggggctgggctgcacggggggcccggcgggatgggccaccacggcccccgccaaggcgctgcttcaccttgtagccaggatcatattcaggatcgtcagtggtctcctcttcctcctcctcctcatcttcttcctcttcggagtccggctctgagagagtgtattctgaatcagaggaatgctcggggcctggagggggacagacaggggaagacagtggtatcagaggaaagagggctaggccaagctgtcccctccctgaatccccacattcagacttgccatagtatgacaaggatagcctagacactacccttcccttccccacagatgagtccccatggcacagaacaagactggcacccagtagattccctgtatctttgtgtcaagcaaatgaatgtcttccaagaactgcatgggacaggactgggcacagtggcttatgcctgtaatcccagcacttttgggtggccaaggtgggaagatcacttgagcccagaagtttgagaccagcctgggcaatatagcaagactccgtctctacaaaaaattaaaaaattagccaggcctggtgatgcattacctgtagtaccagcttctcgggaggctgaggcgggaggatcacttgagccgaggagttccaggctgcatttgagccatgattgcgccactcccttccagcctgggtgacagagtgagacctcaccacttaaaaagaatttttttggccgggcgcggtagattactcctgtaatcctagcactttgggaggccaaggtgggcagatcatgaggtcaggagttcaagacaagcctggccaacatggtgaaacctcgtctctactaaaaatacaaaaattagctgggtgtggtggcgggcgcctgtaatcccagctactcgggaggctgaggcaggagaactgcttcaacccaggaggcggaggttgcagtgagccgagatcacacaactgcactccagcctgggtgacagagcaagactctgctgtcttagaaaaaagcaaaaaaaaaaaaaaaaaattatttgattctttcgattgattgcaaaagaaaacaaaaactccatggggaggtggggtgggaggcatttaggaaggacaaagccggagtagtaaaaacccaccagtaacaacagcatccttgctattgtaggagccctgttcttatacattaactcactaaatcctcaacaaccctttgagggtggtactattactatccccagttgatggatgtggaaactgaggcacagggaggctagacgactcactcccctgtggttacacagctctggcaggaaaagctgaacctgggccatggctgacactggatcattttagggagacaaccatttgaaaaggtatttgtgcaaattaaaacacatgcatacacacagatgtacttttatatctgtggccatggagagagagagagagagagttaggtgaattaaaacatttatttataggtaagatatattactgtgatttcacagttatcaaggacaggcctaggacaagtttaggtttaaagaaaaaggcctgtaatctagcactttgggaggctga[133 bp omitted]tctgaggcaggagaattgctcgaacccgggaggcggaggttgcgatgagccaatattgaaccactgcactccagcctgggtgacagagcaagactccgttcccaaaaaaaaaaaagaaaaggggaaaaatttatagttgatatacggaaaagggcgacatcagctgccattatgggggcgcacacacagagtaatggttggggatggggtccctgtgaccacggtgtgggaagtaccagcttcttcggccttggtggtaggagcctgccaaaagcctcaccttgtatccatcccagccccattcctcagtttctcccagaacccagaggatcctgctactgcaccctgtgctccgcccttgctcctgtcatcacagtggccacaggctcttcataccaggctcctcaccttccaacaccccaggcccatacctgcctcagggtctttgccaccctttctgccgatgtcactctccattccatgtctcttctcaagtgtcaccttctcagtgacgccctggccactccccagcactccctacgccccttactctgcttgatttttctccatcttcttttgagatagagtctcgctctgtcatccaggctggagtgcagtggcgtgatctcagctcactggaaactccgcctcctgggttcaggcaattcttctgcctc[133 bp omitted]tcagcctcccaaagtgctgggattataggtatgagccaccgcagccggctcatttttctccatcttctgactcactgcattcaacatttacttgtgtgtttgtttactgcctgtccccgagagctgggactttgtctggttcactgctgtggccccagcatctaaaacacttcctttgtgcaaagaaagtacttatgacatatttatggcatggatatctctgcatggaatttgacaaaccttttctgaggcttcacacacactgttcctccctctggtgggaatgtcctgccctagtttttcccaccatcctttaggacccagtgggaggccttcctctttggtgaggccgtcccagacctcctcatcccaggcagccagtcactttttttaccaccctcctgctgggtccccagcatcaccagcccagaacaggttataactctttccttctgaacatccgtccctgcagctctctcctactagttcctgccatttaacaatcgtttcctgaggccttggtatgggctgttccccactctatccacctggtgaccccctactcatccttcaagacccagcacaaactctgtcctctgtgaagccaccaccctgaagccccaggctcccagccaggtctctctccagcttcccctgccccagcacctcctcctgttactgccctagaagctgactgcagtcagctgccccccagggtatctcccttatctgactgggaactcctcaagggcaggtatgatcttggggtccgcagcagaggacgtgtgggtgagtggatgatagtggccccaagaccctgatctccctccccaaagccttggcctctgctcctcgcccacctggttgacccgttcatttttttttttttcgagagagagtctcgctgtcacccaggctggcgtgcaatggcgtgatcttggctcactgcaacctccgcctccaaggttcaagcgatcctcccacctcagcctcccaagtagctgggattacaagcgtgtgctatcacacctggctaatttttatatttttggtagagatggggtttcaccttgttggttaggctggtcttgaactcctgacctcaggtgatctgcctgcctcagcctcccaaagtgctgggattacaggtgtgagccaccgcgcccagcctgaccctttctttctctactggcaaaactcctgctcctttttaaagccaagctcatgtcacctcctctgtgaagtcctcgctgactccccaagcggtcagtgtctctctcgtatgggctccccggcccctgcactgctctccatcacaccctgaccactctgggcagtggcccccctccccacccactgactatgggctccttgaaggcagggcctgggtctgccccatctctgtgtccccagcaatgctgggcatgagtcagcctcagaagacatctgctgaatggctgcaaaccagaggaaatatctccagcctcaggctgggacccctcccctctctcctcccacctctgacttcataccactcaccctccagagtcttcaatgcccactattacttcacacagttggcctgtgacaggcaatcaggtcatcgtccacggctaccaggtgtttcatgtctactgtgacttccaggaccacaagcccttttgcgcccaccatgtcttcacctaagagatcttcaaagcccagtatgtctctggcacccagtggatcctccatgcccactgcggatcccaagcctcctgcctccttgaagtccaccaaatcagcaacacccaacagatccttagtgcccaccaaaccagcgacatcccgtaactcagtcatgagcccaagcagttccaagtccaccaaatcgaccagtacaaaaagagccccttctaaccggcccagcagcaggtcccgagtccgcagcaaagcaagaacacccagcagggtgagcaccgacaccaggaccagcaaagccagcaaggccagcgacgtgagatgccaccagcggaggggcacacacagccggggtaggacacctggcagaaggggaagccgcagctccaagaggtcacccagcagggccagcactcctggcaggataagaactcatggtgccagaccaggcatggccagcagggtgagaactcccacttcacagcaaaaagggagccggggaaagagttacggccggcctagaaccagcaacagggaaaggagtgacagccagcctagaaatctgagcaagaagagttaccgcccaccaggaggctcaggtatagggaggagttccgagctggctgtaactcccagtacagccaagtgtcaaaccccgactggaattccctccaaggagaagagtgacaacccatctccatcctcatcaaggaaggtgaagagctacggtcagatgatcatccccagtagggaaaagagttacagccccactgaaatgtccagcagggtcaagagttataaccaggccagcacccgcagcaggccgcaaagtcacagccaatctagaagccccagaaggtcaagaagtggcagtcagaagaggacgcacagcagagtgagaagtcacagttggaagagaaaccatagcagggcaagaagtcgcacccggaagggaattctgagccagatgggaagacacagccagtctagaagccacagcaaggggaaaagtcaaaaccaatctagaacccccagaagaggaagaagtcacaactggtctagaaaccccagcaaggaaagaagtcatagccattccagaagctccagcaaagagagagatcacaggggatctagcagccccaggaaggagagtggtcgcagtcaatcaggaagccccaacaagcagagagatcacagccgatctagaagtcccaacaaggcgagagatcgcagccgatctagaagtccctacaaggcgagagatcgcagccgatctagaagtcccaacaaggcgagagattgcagccgatctagaagtccctacaaggcgagagatcgcagccgatctagaagtcccaacaaggcaagagatcatagccgatctagaagtcccaacaaggcgagagatcgcagccgatctagaagccccagcaaggaaagagatcacagccaacttggaagccccagcaaagagagagatcacagacgatctagaagccccagcaaggagagacagtgcagacaatctagaagctccagcaaagagagagatcacagacgatctagaagccccagcaaggagagacagcgcagacaatctagaagccccaacaaggagagagatcgcagccaatctagaagccccagcgaggagagagagcacagacaatccagaagccccagcaaagagagagatcgcagacgatggagaagccccagcaaggagagagagcgcagacaatctagaagctccagcgaggagagagatcacagccgatctagaagccccaataagcagagtggttacagtcgacctagagcctccagcaaggagaaagctcatagccgatctagaacccccagcaaagaaggaaatcatagccaatctagaacctctagcaaggagagcgaccccagtcaatctacagtccccagaagtcccgactggaagagatcccctactaggacaagcagtctcagtcagaatagaacccctagcaagacaagcagccactccccatcaacatttcccagtgggggccaaaccctaagccaggatgacagtcaagccgacgccaccacctctaaggccaccttacctggggaaaggtcttcatcatcttcttccaagctggcgtagcccccagtctcagctggctcacgggtctctgtcatgaccgggggaggggacaggagacaggagcagagcagcagctgagcagcgtccctccccggccagctctccacagccacacctccggccacaagttctctaatacaggatgttggcaggtagagagggatgctggatagggggaaaggaaagacctgtgatgattcaataaatttttacatagcacccatccccaccaagcccaactgtgtgctcactgctggcatggggcacagaggaccccagctctgtccctgactgtctacagggtcttgactgcaagccctgcccctctctaggtcttttttttttttgagacagagtctctctctgttgcccaggctggagtgcagtggtgtgatctcagctcactgcaacctccacctcccaggctcaagcaattctcctacctcagcttcccgagtagctggaactacaagtgtgcgtcctcacgcccggctaattttgtatttttagtagagatggggcttcaccatgttggccaggctgggctcgaactcctgacctcaggtgatccacatgcctcaacctcgcaaagtgctgggattataggcatgagccaccgcacccgtccccctctctaggtcttaatttccgcatgtgggcaacaaggctgccttctggttcttattcagtggggtagggagaggtgacactccaaatattcaacagtggggactggtgtgggcaccaatcagaactgagagtggagcgggacggataccaggccttaaccctttagttgctggaccatggggaggtctggggttggggaagtgttatggggaaaaaaaaccctcaaactgtgtttttcctctactctcacactatcacaacaatcatcaacacagaattctgtgaccaaatgtgtggggctttttccccacacactacacagcagacaacagctaggtgtcccctccgattccattccaacgctgtccccacacccagctaatttttgtatttttggaagagaca[215 bp omitted]caaacttgtctctaaaaaaaaaaaaaaaattacaaaagttagccggtgtggtggcatgtgcttatagtcccagctacctgagaggctgaggcaggaggataaattgagcctggaaggtcaaggctgcagtgagccgtgaccttgccactgcactcaagcctggatgacccatcttacaaaaaaaaaatttttgctggagctgctcacagaactcaaggaaatgcttacttagatttactggtttattatagaggatattgcaaagaacaaagatgaagagatgtgtagggcaaggtataagggaaggggcagggagcttcacgccctccctggggtgctaccctacaggaaccctcaggtggttagctatgcggaagctctccaaacccagtcctcttgggtttttacggaggctttaagacagcagcattgggcatggacttctctgaaaagtgtcttaagaccaacaatcaagaaggtggggaagattagagtcttgccctggggcaggaaatggagggcaggaggaggtcagagagattctgtttcttcagacctgccccaggcctaaggtacacaacattataacaagagactgtaacaaaggctgtaggagttaccagccaggaactgtggatgaaaaccaatatatttatatatataataccacaaggggggtccaaagtggcagttagggacagggagtacttgtgtagcagtgacacaccaacccatctggaagtattttaatatttaaacaattggtatggctatactagtttgtgattatcagccttagttctgtatcaattggcaagatagtgtctaggtttgccacactctagctgtgtagcaccaagcaaagaacttaacttctctagcctgtttccttctctggaagaaaggggcttccaggccttaactcacgtactccccataactagactgggaattatctcctttgtacagatgaggaaacagacacagaggtgataagtgagtagcccaaggtcaccatctggtaagtggatgaactaggattggaagccagacctttcataaaatgatttctcagctcaaaaggtttttctgaagattcagtaggctcactgatagaaattgctggtgtgtggctggtattccatcaagagtggccattactactcccacccctgcccctctataaactccagatgttccagacctctcatctctccctgtgcacacaaggccttttcacatctgtgggtcttagtacacccactgttgctgtcaagaatgtcctcctcctcctttttttttttttttttgagatggagtctcactttgttgcccaggctggagtacagtagcgcgatctcagctcactgcaacctctaccctgcatcagcctccctagtagctgggattacaggcagccaccaccaccatgcccggctaattttttggtatttttagtagagacagggtttcattatgtcagccaggctggtctcaaactcctgacctcaggtgatccatttaccttggcctcccagagtgctgggattacaggcaagagccaccacgcccagccctccttccccctttttggcctggagaactccttttcacccttcaaagcccaccacaaacataagaacctctatacttcttgcccgctgaaatactgcctctgccaggaagccttctgtgacttctctctctccctcttcaccaacggaccgcccccgccccccaccaaccccaccacacacacacaccactactgtcttccactgtactccctgacagtagagaaccaagcagggccagttgatgcagcctcagctatatctcttacatgccaaggcccatgcactggggatacaatggtggaaaatacatggtcccttcaaagtctggatgtcaagtttaatgctggggactaaagagaaaagcttcagattgaaacctggaggtggctggggcaaaggaccattggcatcattggcagggcaacttcctaaagaaagcacctaaatcttggcttttaaagacagatttcataattggcagaggagaattctaatgataccctattgcctacagggccccatctaatttgggaattctactttataccaagataagattgccagatttagcaaataaaaacagaagacatccaattaatttttttgtttgtttttgggtttttgttgcggagatggtgtctcactatgttgcgaaggctgctgtcaaattcctggctcaaacaatcctcctgccttggcctcccacttcccaaagtgctgggattacaggcatgagctaccacacctggcccttatttatttatttatttaattttcttttttgggacggagtgtcactctgtcgcccaggttggagcgcagtagcgcgatctcggctcactgcaacctctgcctcctgggttcaagcgattatcctgccccagcctcccaagtagctgggactacaggcgcgtgccaccatgcccggctttttttttttttttttttttttttttgagacggagtcttgctctgtcgcccaggctggagtgcagtggcacgatctcggctcactgcaagctccgcctcctgggttcacgccattctcctgcctcagccttccgagtagctgggactacaggcgcctgccaccacgcccgacta[174 bp omitted]cccaggctggagtgcagtagggtgatctgtaggaaaggggcttccaggccttaactcatgtactcccccataaccaggttgggaggttagctcactgtaacctcaaactcctgtgctcaaggtaccctactagcccctaggagagcagctgggactacaggtatgcgccaccatgccaggcttaatttttactttttttttttttttttttttttgtagagacgggggtctcactatattgcccaggctggtcttgaactcctggtctcaagcgatcctcctgccttagcctcccaaagtattggtatcactgcaactagcccaaagaattaatatagctatgttccatgtgatatttgggacatacttttctaaaaggttgtatcttttggatataattgtttatctgaaattcaaatttaactagacattgtatattttatacggcaaccacacacctgggacaatcaagacattccctgaagttaccaggagacaatgcccatcagcctacacttttccaagcccacgtcacacaaggccccttccagagtattccagacgtcaggtagggccatcccttggttcacaagtcccactcctaccacgcctatggcagccaaactgaaaggcaaacacagtgctggagaccccacaatgccctgggcctatagcagtcaattcccaagatgccccgcgtgaacacaataggcacccgttccaatgctcgagcaaagagaccagggcaaaaccttccactacgggacaataacggccagttcccacaattcgttgtggcagttcttcccaggatgccttaggcctatagcgaccaccttcccagactccccgtgtggaagcgctccaagcctccaggacggtcagcggcaggtgtgggataaaaggaaccggtctcgacaaggatctgggacactctttcccaggatgcaccaggcctacgactagcggaccgactcccacagcgcttcaaggcggagcgctcggttctcccaggatgccccagggcggcacaaacgcgtagggggagaaaaagaagccctcgggtcaccacggccccagaccgccggctccccggtgacgggagtcgtcgctcccatcatgcagcggggccgtagcgcccgcttcccggcatgcctcgcgcacccctgcccgggacactcaccggcgccggcggcccccgctccggctctgcggcggcggctgcacgcccagcctctgcgcctgcgtcgcaagtagggtaggacagcgcgcagggggcgtgaagagcctagggcgcttgcgcggcgagacggactagtcctgtagcgctgtgggaagaggggctatgcgcgtcgggccgtcgacgagacccgcgcggggggcgccgtgctttgcccctcgctgcctgggtttacttggtacagcccgcggcccaaaggaacaagaagctgaagggttcgcgcgtgcgtgtgcggggcaggaacgcgccttacaaaactgggatgcgctgggggtggagggcgctagttcggactggatcctgggcccgaggcctgcttatttgcataatcctagcgcgggacaatgaaaggcctcccgcactggaaggagtgatttgcatattccccggaggggccttactccagagcgcagtgattagcatatggcgggggcaacctgagcaaagcgcatgcgcgcagggactgcagactgacgcgaagtgggtagccttgtcttcgtaggggatcagtttgcatcctgagagagggcacgagggccaggacccctcccaaccaggataaaggtttattgatctcctaggtgtcaggccccatgctggcggattctgtggtttctgcagtgaaccatactcctgtactcacggcaccccagtcgaaggagatacgcacctaattagacaactactacccagaaggtcagacctggagtgaggaacacagggggctgtgggagcctaagaggcgcttgccccggcctctggttctagaaagacttccaggaggtggtgatccttaagccaagtacgaataggagccaactagaatgggaatgggtctggcagaatgaactgcaagcgccaaggcccagaggccaaaaaaaaaaaaaaaaaaatagaagcgcatgttttgattgaggaagcaagagcagcttagtatgcctagaacctaactggagacgggaaatggttctatagacgatgttagagttcaactatggctacattccagtcttcctgtaagtgactttgtcacattctggcttaaaactcccccaaagggatcccattaggaaaaaaaaaaaatccaaaaatctttatcatggcctcagggctatacacctggtctggccgtgcttatctttctgaccccacctacttcctcctccctccatttctgtccagctccaccttaccccaaactctttaccagctcgggcctctgctcttgccgttccctccgcctgaaaatgcttttccctctgacctttgaatacctactcttgtgctcaccattcatatcttggtacagatgtcaatctgagaggcttttcctgatctctccataatagcacttacacatttgactggagttatggataaatcgggattggccatgagttggtggtggttgtaactggcatgaagagtacatggggctgggcgcggtggctcacgcccgtaatcccagcactttgggaggccgaggctggtgtatcacctgaggtcaggagcttgagaccagcctgggcaacatggtgaaaccctgcctctattaaaactacaaaaattagccaggggttatggggggtgcctgtaatccttgctacttgggaggctgaggcacgaagatcacttgaaccctggaggcagaggttgcattgagtcga[137 bp omitted]actaaaaatacaaaaaaaaaaaaaaaaaaattagccgggcgtggtggcaggcgcctgtagtcccagctactcgggaggctgaggcagga[133 bp omitted]tgggtttgaagttttccataatgacaatggcataccacatcaccatactctgcatttatattaatagttcttatcacaatctgaactttctttgcttccttgttttgagtgttttcctcatgaaagcttcatgagggtaagaatggagtcgccctttttcactttgggttctcaatgcttagagcaggatcagatttcagattagtgtagcgctgtctttaacacttaacatttgcctgttttattcaccatggactctagaactttgagcagcacctggcacatcgtaagaggttattttttaaagttagaataatacatctaaaatgtacatgaatgaatgagaggcctgggatgccagactaaagagctttgacttggtctaaaggtgatggggagctaggcaaaggttttgagagtttaactttaattcaaagttcccttggagactaatgtctggggtagggggaagccagggtaagggtccgggccatggaatggggtagctcagtcgctatcaaaaagacaagactgtgactatttggctgaagaaatggccaaacccaggtttctggggaggtcgaggtaccctcagtgaggtcaggaccttctcctggcctatactgtccaccagcaaccatcacactcctccctcccctctcccttagttcccctcccaatggtacagcccttgacagcaggacagacacacagccaccccaaacacttgttctctcctcagtttaatggtggttagtgagattgccaaaccccctccccattcccctccccaccccgtacaaaatgtgtgtgtggttttttgttttttgttttttgttttttaacaagaaaaagggggcaaaagccaggaatggggagaggggggtgcaatctgatattttcatacagacttttgattttttaatatattatatataaaaccatgaagaccacgaatcctccccaaactcctttccccctccccggggggcctggaggagagatggggaaggcccccccaggagtgggtggacagagagacaaatatggatgggacagacgttgggggagaaggtagagagaaggggagcccaggaacctggggaagggggattggagaaaagggttggggctgtctccctcactgcccccatcaaagttatgacacaaagacacagaatccctatttccacgccctccccccacccatccccccaccgtgcaaacatggctttgcaaagaagtgcccagagctctgtggaactcttacaatggctggcatggggtctaggacccccaaagaaatctgtgttccccttccctgccccccccacccttcccagaaactgaccccctccccacaagacctggttttgtagcctaggggccctggccttcccccagttatcttcccccaacccaatccctactgccctcactggacttggggggtctggacctttggcccctgccccctgggggacccagacctctgggccctcacttctggcccttacagagatccaggcatccaacacccccatccctgcccaagcgtctgaggtgttagtggtggggggagaagcccaccatcccagactctggtaaatgtctttgctggttccttgcagctggcagtgggggggaccccagcccaggcccaggcctaggcctggggtggggatagggtcagatgaagaattcctctttcctcttgtgtccgtcgctgccattgaggaaggcttctcttgcttctccctgttcatccaagccactggcttcgtgggtcagataggaacctgagggggtgacagacccccggggcaggggggacatatttgtggatccaggagttggacagaagtataagggaagagggagacagacaagacacatgccaggcgaaggaagagggagaaacggaacacacagggagaggcagagaaagaggtaaacagtggcagagaaagaggtaaaagcagaattaggaagactccaaaagctcaccgaaagtgccacccttatcctttctcttggaggtatttccttgccctgctcccagcgaattcagcaattaggaaaataaattgttttattcaaatccatgctctttttttcccctaattttttgtatttttagtagaaaaggggctgcgccatggtgcccaggctggtctcgacctcctagcttctcaagtgctttatccgccttggcctcccaacgtgctgggattacaggcgtgagccaccgcgcccaaccgcaaatctatgcttttaattcagcttctaaattctaccccttttcgagtattgtgccgaaagccccgccccctttgtcatctccgcccccggtgcggcgggatttggaatccagagcctaggctccgccctctcgttaccctggctctaggccccgcctctttccgagccctacaaccaaccaaccgtagagtccaggccccgtcccactcacccttctgccgtaccgagcaccagaccatgcccactagcacacatatgatcagaaacaccagcagcgccaggatgccgcccacaatggcatagggaaccgacgtctgagcctctaccaccgcaccagggtctgccagagggacacggcacaggaccaggtcatcagaggacgatcccagtctggccccatcgctgccaagcttttaagccattctgcacacgtctaaccgtgcccttttatgtgccacacccctcaaaaattactgccaccttgtagtctcttctctttccagatgcttgttggtttgtacactgcccgacccctcccctgagtcatgttacattttccttttctttttcttgttttcttttgcagagacgggggtctcactatgtggcccaggctgatcttaaactcctgggctcaagcgatcctccggcctaggcctcccaaagtactgggattagaggcgtgagcgaccgcacccagccatcccttttcttttgactcaagtttcttcctccactaagaaacagagtccaagaaacaggtccaagtcccttcccaccttgtctaaaacgctccaagtatttaaagtgctgggcccaactaccaaaatttctgccccaccgtcatagagctaaacacagaacagctgtgtgctagagcccattccaaccaccttacatatttagttcacataatcttcacaacagccttgttatataggtgctattgtttatttccactttactgatgggtaaactgaggcgcagacaggttcggttacctgcaatagaatgcagccaacccgaatttgagccccgcgggccagtctggtcccaaaacaaaaagaactctgttggctgccgaacccctgagttatgtggcctctttgctcaagccccgcccccgccacctggcgccccgcccccgccctcagtcggccgcagcctgctctcaccgtagaccacaagtacgtagagcgccctcgcatggccgtgcttattggacgcctcgcaagtgtaggtgccgttatccgcggataccagacccggcagcgtgagcgtctctcccacggcctccgccctctccggcaaagactcattcccgcggttccagcggatctggtttggcctgggtggggataaagtatagtgagagttaggaaccgaggtgccagcacccaattctgacttgtcaagaatctagacatgcaactctcatcccgcagggacctccaaataagaggcttcctgctatctctttcctttctggaaaaccaacagtcctgggcctacttccacccatcaccaaggtctcaggaattctagcccaggctgaacatggtggcttatgcctgcaatcccagcactttaggaggctgagacgggaggactgcttaaggccagcagttccagaccagcctgggcaacacagggagaccccgtcactacaattaaaaaataataataataataataataattctagccctcccacgccattccatcctcagcaaccaggagtctgaggctgcacagcttcagtattggggagtctgagcctccagattcctcctccctcaggatccaggagtccaggtcccagatccctattcgtccaggtccccagctctctcctcctcaggacccaggaatccaggtcctagctccctgtttgtccaggtcctcagctctctcctccttaggacccaggagtccaagtccctggtccctgttcttccaggtccccagctttctcctcctgaggacgcaggaggcccccagagctcacctggggttccccgtgacagcacacgtcaacaccagcgtgtctccctccctcaccacagcttgggaggcatgaatccgggccgtgggggagtctgttaggcaaaagtaagaggagagagtagtttccaagccatcacgcaggacaagggggaccctcgcgggtgcgggtggctggcgttgggatcccttgggtcctggcccgccggtcacttacactgcacatccagcacgtactgcgtctgcttgctgtgtccggagggcagcgcctggttctgcgcctcacagatgatgataccaccgtcgtccttacggtccacacgaaaccgtactgtgcttgccacgctccagaccttgccattttcctggctgctgctcactcctgccacaccccggtcagacactgtcaggccacaattccggctccatccacccacccacccgagccaacgccaaagcaggctatttgccaagctccaccccttacccacaggccccgcctcttgtcctccaagctacgcccctcccctaaccaagcccacgtgcctcctcccaaagctcttccctctttcacgctcatgctttctcgtctatcaatccatttaattgctatatatataaaaacataaatttatatatatacttagagacagggtctcacaatgttgggcaggttgaactcctgacctcaagcaatcctcccatctcagcctcccaaagtgctaggactacaggcgtgagccaccgcgctcgacatcaaccactacatattgaatgtccagtgtctgtgaaaacctgtggctcctctccacatataaacaacctctcctaagtcccacctcctccccatcccttgtcagcactcggcccagggtacctttcagctccttgcggtcccggtaccagcgcagggtggcagccggacgggaccgcggaacgaggcagctgagctccacctcgccgccctctaccgcctgctcccggacctccaccacaggattctctggggccactgccgcagggagaagggaagtaaggggttaaagaaggcacgaacgtgggctcaaagcgatcgagctgcctgttcccagcgaccatagggaaccagggtcccaggtggcaggggtcaaaggggagaggtcaggagccagatgcccatccaggatgttaaaaatagccatggtctgaaagtctcaggagaagagagaagcagagaagaaaggaggagaggatgcgtctgacaagggggagggcgttacctagtaccgtgagcgtggcaatctggtggtgggtgtcttctgtgtagagctggcagaaatagcccccctcgtcctccaggcgggcatctgagagccggatccgcacccggcgtggggagaactcctcaagctggaaacgctcatccttcaaggctagagagagtgagggggaaggtgtgaatttcgggagtcctggcctcacaagtcccacccttccgacaggagcttagagtccagccctctgcctcttttctccagccatatctatgagtctgaggtgtccaactatttactcccttgaggacccagcattattcaagtcctcctgcctgcaggaccagcagtccgggaccccagccctttcttctccgagacccaggagaccaaactctcaggtgtgtcctctttcaggacatgggagcctgggccccagccctctcttcctttaagactcctgagtctggtccccagcactcaccacgggtgccattgaagaagagggtctgccgggctgggttctggatgacaactatggacccatcatactggtgcagacggcaggtgatctcagccaccccaccctcagccactgtcacgttctctgtctgtacttcctgtcctgcccctggacgattagacaaagagacaggatagaagacttactgagagctgcaattcaattttttctttctccctcttccccatccaaacctccaatccctctctttcccctcattcattccattgcactgaacatttcctgcaggctagagtccaggacagggaggaaatctgctccctactctaaaagagctgcagtcaagatttagtagaatatgctctaatgagggcagcacagggcacactaggagcccagagcaagggaggactattatagaattgcctagagagatgggtagccagagagggctctgcaagaaagctccattggatctggatcttaaagagtaagcaggaggctgagcgcggtggctcatgcctgtaatcccagcactttgagaggccgaggtgggcggatcgcaaggtcaagagatagagaccatcctggccaacatggtgaaaccctgtcactactaaaaatacaaaaaaaaaaaaaaaattagctgggtgtggtggtgcgcacctgtagtcccagctactcgggaggctgaggcaggggaatcgcttgaac[138 bp omitted]tgtgttcaccaagcctcatctttcacacctgggcacatgttgtagcccgtttgcaaagatagccgtaatattctcctgtccctggacatgccctttgcaagttgattttgccattcctcccattgagaaggcactttgtcccctactagtctgggtaagccttgagagttgctttgaccaatagaatttgctagaagtgatattgagcctaggcctgaagaggccttgtagcttccactcctgccctaagactgttgcatgaagatacccagactagtgtctttgcagatgaacaatcatggtgaaagagaagcccagccggcagccagcaccaatcgccagctgtgtgagtgtggccatcctggatcatccagccccagctgccccaccagctgacagcagccacacaagtgaccccagttgagaccaataaaagatctgcccatctgatacagcccaaactgctgaaccccagaatcatgaacaaataaggtggtggttgttttaagctcctaagttgtgggtgatctgttctactgctaaagttaactgatacaatacataattaggctatacttcccagcatcctttatagttaggtggggccatgtgaccaattctggccaatgggatgtaggtggaagagaaacacctcttgcagcctgacccatctccctcataatccttcacactggctgaacagagaggactccaaggagcctagaggagggcagaatcacaagccagaaggaacctgggtctctaactgactgtcccccatgacccgcctgtataggactgtgatatgagcaagaaatatacctttttgttaagccattgagatttcaggggtgtctgttacagcctttaacctaccctgattaatccatcagaaaaacaaggtggggaatctagaaccatcagagaaaagcatttaggaaagctgaaagccaagactaatcatcagcattaatatcatcatctgttgtcttcaaaataacaataacccccatagctaccaattattaggtacttgcagtgttagtccctgtgctaagggcattacccatataacttacctttaatcctcacaatccctgtgtaaggtagacatgattattatcattattattattattttgggacagagtattgctctgttgcccaggctggagtgcagtggtgtgatctcagctcattgaaacctccacctcccaagttcaagcgattcttcagcctcagcctcccaagtagctggaattacaggcatgcaccaccatgccgggctaatttttatttttagtagagacagagtttagccatattggcctggctggtctcgaactcctggcctcaagtgatccgcctgcctcagcctcccaaagtccagggattacaggtgcgacccaccgcgcctggccaattattattattatttttaatttgagacaaggtcaggctggagtgcagtggcacgatctcagctcactgcaatgtctgcctcccaggctcgagtgatcccacctcagcctccccagtagctggaactacaggtgcacaacatcacacctggctaacttttgtatttttttagagacggagtttcaccgtgttgcccaggctggtcttgaacttgcgagctcaagtgaactgcctgcttcggcctcccaaagtgctgggattacaggcatgagccactgtgcccggcctgcgctattattatccccattttgcccggcctgcgctactattatccccattttcccccatttccatttttcttttcttttttttttttttttttttttgagacattgtcttgctctgtcgcccaggctagagtgcagtggtacgatctcggctcactgcaacctccacttcccgggttcaagcaattctcctgcctcagcctcccaagtagctgggattataggcacctgccactgcacttggctaatctttg[155 bp omitted]gcccacagagatgaaatgacttgcccaagttcacagccaagagtggcagtgccaaaatcttcgtccaaatctctgattctgtatcctgaatctgtatatccactcctggctgtctggattaagtgtccatcattggcagggggttgtgagagccgcttgtgatgggcctcgaatgccaacctaggagatttgctttcatcctaagggccagtgaaggttttgaagcaggaatatgccatgattagatctggctatttgtctttaagtgctggataactatccatgtcttttacattcaggtgctgggttgcattcattcaggagtatttcctgagcatcacgtaggttttcaggggctgagtagtcagagatgagttagatgaggtccctgccctttaagatttatgggaaggtagga[131 bp omitted]aaaccccgtctgtactaaaaatacaaaaattagccaggtgtggtggtgggtgcttgtaattccagctactcaggaggctgaggcataagaatcgcttgaacctgggaggcagaggttgcagtgagccaagatcgcgccactgcagtccagcctgggtgacagagcaagactccgtttcaaaaaagaaaaaaaaaaaagaaataaataaaagaaagtgttatgttttctgtaagagggtaggtaacctaatttggaagttgaggggtagaaaagattatttctgggggatggagacagagacttctggcttcctattctgacatccatttttccctttctcctcagtaaaagaaaagaacactggttgtattttatggttgcactatgtccagcagaaaaaggcattcctcagtctccttgcagcaaggtaaagccatctgataaaattttgtccagttggatataagccaaaatgttgcgtgacaattttgggaggacttcctgaaacaggtggacaaaccctttttctactgagtcacctttgtgccacctggaactaacagtgtgacgcgtggaatttaggcagccatattgaaccatgaggacaagagcagtggggatggcggaaccaagagctggaaggtgcctgagtctctggtgaagatgtggagctgctgtaacagccctcaactcctagttctggacttcttttatgttttagtgtaacgctttgggtatttttatttttttaatttattttagagatgaggtctcactatgttgcctaggctggactcaaactcttatgctcaagcagtcctcctgcctcagcttcatgagtagctgaaactatagcactttgggtatttcagccactgtttgaggtttttctagcacctcctggaatatcaagcttaacatgtccaatccttgccccagatattttcctccccaaattttctcaatctcaataaatgtcaccaccatccacctggttgctcaggtcaaaaacctagaaatcattcaagttctctccctttccctcatccccaatatccattccatcagcaacatctgtccattctacctccaagacatatcccagatctcatcacctttgtctgcctctcctaccctcactctcatccagcatcatccctcacctggactctgcaaaagcctactcgtgggtctgtctgcatccctgtctgcctcctccagggccattctccacccagtggccggatcgatttttcaaagaggtaaatcagatcaattcacctttctgcttaaaaccctccgagggctgcccgtaacatgtagaataaaatagagaccccttcccggggacttcaaggtgctatatggcctggccccttgctgaccttacttcactctgggctcgctagccttgctgtccctcaaacatgctgagctcgctcccaccacagggccttttcccttttcttccttctgcctggaatgttcttctccccacctcccaagccccatcttcccagggctgactcctgttcccatttgggtctcaaatcatatcagtaccttctcagagaggccttccctcactgctcatcccttcacctttagaacactttcttttcttttaagagacaaagtcagcccagtgcggtggctcacgcctgtaataccagcacttttgagaggccaaggcgggcagatcacctcaggtcaggagttcaagaccagcctggccaacgtggcgaaaccccgtctctactaaaaaaatacaaaaattagctaggcagtggtagcccgggctactcaggaggctgaggcagaattgcttgaacccaggaggcagagg[133 bp omitted]tggctcactgcagcctcgaactcctgggctcaagccatcctcccacctcagcctcctaagtagctgagattataggctcctcccaccacacctggctaatttttgtgctttttgtggagacacagattctccatgttg[133 bp omitted]ctatgaagatttcactggaattatcagattaatttgcttatttgtttactgtctgtttgtcacccatgactggaatgtatactctaggaaggcagggatataatccaatgggtttactgctgcacccctagtacccagaagagtgcttggcacctgataagtgtctggggaacttgctacatgaattacatgtgtcagatgggatatctgttcgtctttcttctctcttttttctttctctctttctctctctctttctttctctttctttcttttttctttttttgagataaggtctcgctctgtcacccaggctagagtgcagtggtgcaatcatggctcactgcaaccttgaacatgtgggctcaagcgatcctcccacctcaggctaccaaatagctaagactacagaggtgcgtagctatgcccagctaattaaaaaaaaaaaaatttttttttttttttagagatgggggtctcaatatcttgcccaggttggtcttgaactcctaggctcaagcaatccccctgccttggcctcccaaagtgctgggattataggcatgagccattgcagctggcccagacagaatctcatttcagcccgacaactttgtgacatcattattttcatcttaaacacctaggttgatcccagctcaaccacttgccatctgtgtgacctgtgggcaagtgaccttacctttcggagcctcagttgccccatctataaaatgggaatgatgccagtgcctgcctcataaggatgagccccgctcctgaagctcagggagccctctctgcaaggctgttttagtgcaacctccggaaacatgcccatgcatgtgaaaactggcatgcacattctggtgcttttaaaaacatctcgaagcctatccacagatcctggacctcaagactggttcagtgctagccccccattttacagatgtggagaatgaggcttagcgggtcccaggcaagtcagtggcaaaactcaccatctcctgggagccatcaggttcctctggatctgcccccaccaaatttatcccctgctctctgcttgagggtgcacatggggtgagggtgggggtcttttgttttactccctccccctcctgaggagtcagtaaccaacagtgtctgtgcctggaatattaatgtctcagcagcttttgtttggggggttgggggtggtgggggcgggactttctggtcagagaggggctgagctttggggactgaggcactggccctttaaactgtgttgacagccaggagtcgtcatggggatggtgcttggaaaaggggacagggagggtttgggaaagagtggcggagcaggtaatgcgtaagacccaggaatccagcccccaactacctcctctcccaggacccaggagtctaggctcccagcccctcctccatcaggttccaggagtctggaaccccggcttctttccgccttagacccaggaattcagcccccaaccacctcctctctcaggttcccgaaatccagacccctagcccccttctcgatcaggacccaggagtctgggctgtcagcagccccttccttcaaacctaggagtcagagcccccagccctctcctagcttagacacaggagtctgggcctccagccccctcctccttcaggacccaggagccaggggtccagagtacacagctggtggatgtttccacggagactaagcagggtggggggagcgcttcctgggtcctgagtcagcgaatacccaagggagtctcaaggtcatagttccgggaaggtcaccaccaccccctctgtatccgctccccagggggctcctggcatcctgcctccttcccccttcctcccttagggaggtggtacatccctgcgtcctgactgaacccccctcagccccccatcaatggcggagtccgaacatcctcgcacaaagcgtcaattcttccccagctcagccttgtgaaggcgcctgtattcgcaggacctaggcgtcagggtctcagcccctcctccctcagaaacctgcagtggaatcccccgcctccagccccttcctccctcaggacccaggagtctgtatcctcatcccttcctccctcaagacctaggagtgtggactcccagcccccttttccttccggacacaggagttccagccctcggccctctcctctcttaaacccaggggtctaagaccccagcctcctcctccctcaaactcaggagtctaagatcccaggcccctcctccctcagactcaggagtctaagatcccaggcccctcctccctcagactcaggagtctaagaccccaggcccctcctccctcagactcaggagtctaagatcccaggcccctcctccctcagacccaggagtctaagaccccagcccctcctccctcagactcaggagtctaagaccccagcccctcctccctcagactcaggagtctaagaccccagccccctcctccctggacccaggagcctaagacctcagccccctcctccttgagacccaggagtctaagaccctagctccctcctcctttagacccattagtccaggcccccagaccctcctccatcagacccaggagtccaggcccccagcccctcctccatcagatccagcccctcctctcctgaaaacttttgactctaactccccagtcctcaacccctagaagcacagtcctgcctttcctcaatcctctgtcccctcccatctggggacctaggcatcaggtgggggcgtaggggtgagtcagcaacctcacacacaaagtccccgctgtggcccccacattcctgggatattcgggactccctggattccaggcctcaggcccagccagggagtggggagtcccccagaggtcctccctgggtgtggggtacgagaggaattcctgctccgggaagggtgcaggcctgcactgagctccctctgtccgaacctccacgcccagtgccctctattcaccccctcttcccagaagagcccaggctcagcacctgccccttgccccactgggtgcccacggaggagcctgcgtgcctgctccctatgggcctggggtctgcacaggcggaaatcagtgggtgcttccgttctgatgccacaggccattggatgctggcgggtctgactgtctccaggccaccccccacccctcccagagagagaaagctgcctttgtgttctccaagatggggacaggccaggctcgcacgacattaacccagccttaggccccagccctgctgtgtctaaggtcttggaatccactgcagaacctgacccccacccccaggctctggggacacaggcgcctggctcatgggtgggtgggtgggggggtcagtgatagaaacctccaaaacctgttccttggggtgactcacaatggagggagggtccccctattctcaagagtggctggtcagaattttagcaggaaaaagtgagtcaccctgggaaggaaacattatttagggaccaacaactgccccctccacaagacccctcaactcctaatagcctctctattctttctttgtattggatatctgtttcctctcctcctttctgttctacccagtttctggctgcgggtcccatttctgcctgggtgcatccctgggcaggcaacccatccctccctcttgctttctctcctctgcccaccctggatccttctttgggcataaatctcatcttcttctgctatgctcagaagatgaatgaaccaggagagagagaacatgtttttaaaatggcgcaaatgcaccccatctcccccgattcctgctggctgggcaaggtgagagaggaagaagtgactaagagagaaatgtgggaacaacagataccccctaaaatgtggtagccaaggccactgagaaatatccaatggaaaggagagcaggaagggccctccaagaccacatgctacagcctcctaccccatgctttacagaacgggaaagtaaggcccagagagggacaaggactgatgcaaaattatactaaagggtcctgggtaaggcttggacccaagttccttagctcccagctgagagctcttcccatgacaccaagctcagtttctactggtaaaagccacatactatttactttagagaaagtttacagagagggttagggtgccaggaagcagtgacttggaaatcaaacgagggacagggctgtagacctaactcccagaagcaccagagaaaggcttttgcacggggcgggtggtcaccttaagctatattctgatcctgagaattcaaagtctgatgattctaagctgtcaggattctaaatgtcatagatgtcaagatccaggaactccaagacatcaagatttcacgatttttaagacgtcaagatgctagcatgctaacaccatcacggttctagaactttaaaggtgtcaagattctaaagccttctggattctagaatcctgtagatgtcagcattctaaagtaccatcaggttctttatttactggattcattagttccaggattctatgagcctggtgtttagcctaaaaaataaagataaattaaaattgatggaaatgtcactgaggtaccaaagttctcatctgggaaattgtggcatgtctgttgtaaagaaaggaggtaatgatgcaagttctaaagcagtcacagaagactagagaagaaagaaagacagtgagaggacagctttgcccctcatcctggccgaggtgaggatggctctgcctcaaaccctggagtggggaacatgtaaccgcactcaacttgccagaaaccccttcacggtctgagctggcgttccctttcatgtcactgagttcaacatcctcactttacagaaagagaaacagaagcctggagagaggaaggtgtttaccattggctgcgatggcaaatggcaagagccaagatttaagcccaggccgccagccccatgccacctggttataactcctctcaccaatctctgccgaacacccagccctcctgcttctgcctagccaccttccaatcctctgttccttccaaaagtggccttatccaccagggaggggtgacccgtggcaggttcaagacttacacagtgtgagagtgtgtgtgggtgacatttcctgaccttgtccccattctcagggtcacccaacctcgggggtctccagcttctcacagtgtgtgatgagggtatgtggatggctccctggatgtcctggacaggggcttctctgtgagtcaagcctgggtgtgtgaatgggtgagcagggtttggagaggcattcgctgaatccacgtgtgtgcctacacgccaaggtcccccattctcacttccccacacacatgcacacagatgttcccctccagggctctttagaatgccctgcctgactgaattcctcttcaggggcacagagggatagagagagggaggaaggtaggatgggaatgggagatcccgggatggaggctgtaagcgtagagagaggaggcacagcagaaagacagggatggagatagtgggacagagaagggggaaagagacaggtgacagaaagggttagagaaacgagtgacagaaagacaggggacagagacaaggggatggggcagataggggacagagaaaaagggacagaaaaacaagggtgacagcgagacagagacagggaccaagaataggggcagagagggagggcagaaatccgggggaaagagaatagacaggatgatggaggggacagagtgacccaggaaaaggggacagagaccaggggacagaggtaggggacaaagacagaatagatgaggaacaccgaggcaagaagagagggagacagacagaaggagggacaggacttcgagactgagggatagaggacaagggtagggggacgaggagccagacgggggggttcagagacgggcggacagagggacgcagagactggacagaaggacagcgggaccggcctggggagggcggacttgtgtgtgtaggggggtctcgggccctttgtccccgccgggatccagcctgcgcgggtgggggggctgcggcacggcggccgggccccgcgccccctcccccgctcgtcgctcccggctcccggcccgcgctgcgctttgtcccggggagggggcccggcccggccccgcgcgcattgttcggcctctgcggccccgaggctgccgggctgtcaccacagcgcgccccccgccccagcccggccggccgaccccggcccccgaccctacctggccccgccgcggccgcccacagcagcagcagcggccactggaagcgccgggcccggcccatggtgccgccgccgccgccgccgccgctcgctcccggcccggcacctgcaccgcccgcgccgcccgccccgccccccgcgccccgccccctgcccgcccgggggcggggcgccgaggccggggcggggccggggaggggagggggagacggaggagaggcccggagacaatcggggggacggcacggtgggggaacggtgcggggtgcgaaagctggagaggagaggggtgaggagggcgggaaggggtgcgcgggagggcgacagcggcgtgggagcaggtgggggatctcggtgagcgcgggaaatggagggtgttgggtgagggtgctgcgtgcgggcccaggtgctgcgcgcgagggtgcggagttgctggcatgcagggtgcttgcgctgcgcggaggggagggtggcagggtgttgctggaggctgtgcgagggtgggggcgcgggcgtcgtggggtgcggtgtgtgcgaagggagagcgtggccagcgtgacgggggagcgtaagggagggagtgcgacgtgggaaaggtgagtgtgagaggcgtgctgcgggcaggtgggtgtctggagtctagcgagaggctgtgagctgagccaccgggacaggggaggctgcagctggaggtccggagggtccggaggtcgaggcaggtcaaggatctcccagggcagggcgaggctggggctcaggagtggggtggggtcagttccctccctccctctctcctgtcctgacctgaaaaccccgtgtttccgcgtcattctccgggaggggccccctgaaagtgaactaactggaaggaagcctgaatcctgggtcccaggagggagaggctcctgtgaacaccttccaagccctggcgtcccctctcctccctgctgtctccctgccccagcctctctccctctctctgcatgtatttgcctctgcccttcctctctccccatctttgagggtgactcacccctccagacttaggtcccttctccctcctgggagtgggtttccctgagcccacttctgtgacaccctgtagacctgatgcgggatcattacctatgggacccagaaagagtgagaaaccatggaaagaaggcctcgacctctctcatgcccatttgtcaggcaaactgaggtccagaagtgccaattatgaacatctttccttcccccctcccccctccccgcccagacggagtctcgctctgttgcccaggctggagtgcagtggcacgatctcgactcactgcaacctctgcctcccaggttccagtgattctcctgcctcagcctcccgagtagctgagattacaggcgcccgccaccatgcctagctaatttttatatttttagtagagacggagttttgccatgctggccaggctggtcttgaactccttacctcaggtgatccatctgtctggcctcccaaagtgctggattacaggcgtgagccaccatgcctggctgaaaatccttactttttattccgactaaaaaattttacatccagtcccacaagggacttcagcttcacacaccctttctgtcctcagtacccagctcccagtatcctttctgacctcaaaaccatagctaccatcaacccttgtgtcccaggaccatggctcccagtgtcttctctgtcctcagggtccaagctcccatcaactcctgtgtcctcaggaccacggctcccagcatcctctctgtccttcaggtccaagctcccatcaacccctgtgaagcaggaccatggctcccagcatcctctctgtcctcagggtccaagctcctatcaactcctgtgtccccaggacgatggctccagcaatcctctctgtcctgagagcccaagcttctaactgcccctgtgtccccagatccatagccctgagcaacttccttctttttcagtcctcagcttcccagcttctgtagacttgggaagagatagtctctaatcctctttccagggctcacattctgtgacttttgctagatgggagaggaatgtttgatctgcctttggaatactggtccaaggggtaactagtagttgccttttcccgcaggagccaataggcccgctcactctgtgctctgacagatgtctcctgctccagctgaaggggaaccttgggagatgttggtttggttctcacctgtcatccttaagtcccaccattccatgtgaagacatcacaagagtagtggtcctgacgggcgcgttggctcacacctgtaatcccagcactttgggaggccaaggtgggccgatcacttgaggtcaggagtttgagaccagcctgaccaaccggccaacatggtgaaacaccatctttaccaaaaaaaaaaaaaaaaattagcaaggcgtggtggcacgtgcctgtaatcccagctggtcggaaggctgaggcatgagaatcccctgaacttgggaggcagaggttgcagtgagctaagatcatgccactgcactccagcctgggtgacagaatgagactcagtctaaataataataataataataataataataataataataataataaatagaatagtggtcctgtccccatcctacttcagggtaccctgtccattagggatttagtgcaagtgacagcaagtgcaacccaactggtttgagagaaagagaactggttcacacataacaaaaagtccttctatggctggctttggcgaggtctgtcaatctctgtcctaaggatgcatggctcccctcctgtagcaagatggctggcagatacccctggggccagattcatatttggggtgattaagattctgcaagagagagacaacctttatttcacacagcttttcaattgttgcctgtccctggtgagactcggagacctagctcttgcctggtttctaaactttcaataacaccgtttttgcttaagtcagcacaaacagattttatttcttgcaagcaaagattcctgaacaacaacttcagagccgttaacaatgaggtcctgatcacaagctatggtataggacgtgagaaatttgtccctagcctcaatatctgctggagggcatcatggaataagtatttctatcctctgatccccactgtagggcatcatgggatatataatcctaaccttcaatctctgccatagagtttcataggcaatgcagtcctagcctcaatatgttgtagggaattatgggaaaggtgaaattatcctcaattataatacagagcatctcagaaaatgtcgttttagcctcatctctgctgtagggcatcatgggagatatacttctggcccaatttttgttgtaagttgccatagaagatgcagtctttccttccttcccttttttcttttctttctttctttctttttttttttttttattatgtagagacagggtctctcgctatgttgcccaggctggtcctgaactcctgggctcaagcagttctcctgccttggcctcccaaagtgctgggattacaggcaagagccattgcacccagtcccttctctcctttctttcttcatcacctgccatattccaggcactaggaataaatcatcaagtaaataaacggccttaccctccctggcaattataatggggaaagttagctaaaaacaaacaaaaattactgttccatttaaccatcgctgaataacaaaataccccagaacgtagtggtgtgaaacaacaaccttttaattttatgattctgtgagtcaggaattggagcaggattggtgtgtatctgcttcatgatgaactggagccaaaaatgaactagctggaacagctggagatggaggggaggggcatcaagggccatatatctaaggctggtggttggtgttgtgggttttgaatagtgtcctccaagtaaaatatatgttgaagttctagcccctggtatctgtacatgtgaccttatttggaaataaaatctttgcaaatgtaattcacttttttgtttgtttgtttgtttgctcgagactgagtctcgctctgtcacccaggctggagtgcagtggcatgatctcggctcactgtaaccttcacctcctgggttcaagcgattctcctgcctcagcctcccaagtagctgggattataggcacgtgtcaccatgcccagctaatttttgtattttcagtagggacggggtttcaccatgttggccaggctggtctcgaactcctgacctcaaatgatctgccacctcagcctcccaaagtgctgggattataggcatggggcactgcatcctgcccagatgtgattaacttctaacccctggtatctttgcatgtgactttatttggaaataaggtgggtttttttcttgtttttttttttttttttgagacagtttcactttgtcgctcaggctggagttcagttgcataatctcagctcactgaaacctctgcctccgaggctcaagcgatcctcccgcctcagtctcccgagtcactgggactacgggcaagcgccaccacacccggctaattgttgcagtttttgtagagatggggttttgccatgttgcccaggcggtctccaattgccaccctcaagcaattcatccgcctcggcctcccagagtgctggaattataggtgtgagccatggcgcccggccagaaagtctttgcagatttagttgaattaatgactaaatgtttccatgctgagttagagtgggctctaaatccaatgattgatatggggttataaggagagatatttggagacatagccacagtcccagggaaggtggacattggaagacagaggtagggattagagtgatgcagctacaagccaaggaatggcaaagattgctggcagtccctcagaagcaaaggagaggcaaggaagggttcttcccctgagacttttttttttttttttgagacggagtctcactgctgtcagcctcagctggagtgcaatggcgcgatctcggctcactgcaacctctgcctcccaggttccagcaattctcctgcctcagcctcccgagtaactgagattacaggcacccgccaccatgcctggctagtttttgcatttttagtaga[143 bp omitted]agcgtggctcttcccgtgagacttcaacaccttggttttggacatttagcattcagaactgtgagagaacaagtttctagtgtgtgtgtgtgtgtgtgtgtgtgtgtgtgtgtgtgtgtgtgtgtgtatgtgttttagacagaggctcattctgttgcccaggctggagtgcagtggttcaatctcggctcactgcaaactccgcttctcagattcaagtgattcttatgcctcagcctcccaagtagctggaattacagaggagcgccatcacagccggctattttttttttttttttttgtacttttagtagagacagggtttcactgtgttggccaggctggtctcaaattcctggcctcaagtgatatgcctgccttggcctcccaaagtgctgggattacaggtgtaagccaccacacctggcctaagtttctgtgtgtgtgtgtgtgtgttttgttttgttttttttttttttttgagtggagtctcgctctgttgcccaggctggagtgcagtggcatgatctcgactcactgcaagctccgcctcccgggttcacgccattctcctgcctcagcctcccgagtagctgggactacaggcacccaccac[138 bp omitted]cccggccaagtttctgtggttttaagccaccttgcttgtaagatttgtgtgtgtgtgtttttaattttttatttttaagtattatgaatacataatagtggtgtatatttacaggacatatgtaatatggttttgggttttagtgttttttttttggagacagagtctggctctgttgcccaggctggagtacagtggtgggatcatggctcactgcagccttgacctcccgggctcaagggatcctcctgcctcagcctcccatgtaactaggaccacaggcatgccccaccacatccagccaatttttttttatttttagtggagatgaggtctcactgtgttgcccaggctgatcttgaactcctgagctcaagagatcttcctttctcaccctcccaaagtgctaggactacaggcatgagccactgtgcctgtccttccatgatgttttgatataggcacacaatgtgttagtttataaagtttgtaataatttatcacaggcagccctaggaaactaatatagccaagtttcctgtttcttctctatatcacatctgctggggctacatgtccaaggtggcttcttcacccacttgtctggtgcctgggctgagatggctgaaacatctggggctctatctccacatggcatttatacatgagtagcttgggcttcctcacagcatggtggtctcagggcagtagtacttttacatggcaaccagcttccccagagtgagcgttctaagattcagaaagtgaaaaatgaaagtttcttaaaacttggttccagaacatagcacagcaaaacttccaccacattctactggtcaaagcagtcacagagtcactcatattcaagaggcagaagtacagacctcacttctttaagccactacagtgacaggtggtgatatgtcattagagaaagccctaaacaagaaccttgtccctcacctgcccccaaataccatggaagatgtctttttttttttttttttttttttggggatagtctcactgtgtcatgcagtggtgtgatcttggctcactacaacctcctcctcctgggttcaagcgattctcctgcctcagccttccgagtagctggagttacaggcacccaccaccttacccggttaatttttgtaattttagtagagacggggtttt[136 bp omitted]atttgatggggaatgtaatttttgtctccatgggttgccttagcaaatgatgagaagaacatgaatttttcaatattgtgctcctagagtgccattgaaatggtagttctgtctctttttctgacagtcctgaggcatcccgggaaatagagcccagcctttatccccggtccccagcacatcaggggaagtgcactcctgtccttattcctcactgcagtgcatgcagggagttctggccatcaggttatcttctatccgtctcctttcccaaagcatgctgggaaatgtggggatgtctccttagaacaacaaaatagttgcaacctttgaagtttaggagaagactagaaggttagtgttcagtgtgtgatctggaagcttgcatttgtaagaattaaagaaagaggaggccaggcacggtggctcatgcctgtaatcctagcactttgggaggccaaggtgggcagatcacctgaggttgggagtttgagaccagcctgaacaacatggagaaaccctgtctctactaaaaatacaaaattagccgggtgtggtggtgcatgcctgtaatcccagctacttgggaggctgaggcaggagaatcccttgaactaggaggtggaggttgtggtgagctgagattgtgtcattgcactccagcctgggcaacaagagtgaaactccatctcaaaaaaagaaaagaaaagaaaagaaaaaggaaaaggaaagaaacatgaaatgtggcttgacggtgaaggacaggtttattttagagaaaaccaacctgaggggggcttttggctgagttaggttagagagcccttttttttttttttttttacagactaaggatatttaagagttttggaagggggtgcttatctaggttcggaatgttttcatgtgaggaaaagtttattgtggggttggaaagtctctggtcggaagggaggctatctgggggttggcatgtttctggtcagagaggggtttatcttagggttggaatgtttctggttatgctgatggtagccattaggctgatgttttggggctggatttagctgatttttttttgagacagagtcttgctctgtcacccaggctggagtgcagtggtgcaatctcggctcactgcaagctccacctcccggattgacgccattctcctgcctcagcctcccgaatagctgggactacaggcacccgccaccacgtccggatttagccgatttttaatcaagaggaactaagaatggtggtgtttgttcaagatggcagtgctcctgctctgtcagcatttggagtccagaaatagatgtggaggcagcccccaggaggacttccaacctaggcaggggcctcaaacatgacccctgattccaggagcctgtgaaaaggtgtcccccaccatttatcctcccaaagatagacactacaaagaagggcatacctggccttgtccactggtacaaaatctttatgtaagtataaaataaataatatgaatattaattaataacaacaacacaacagcggcaacaatattaataataacaagagctctcccattggcccacggccttcctccagcttttctcttctgcttcacacaactttgtgagatagctgttttcatagctgggaaaactgaggcccagagaggtcggcacactggcctgaggtcacacagcaagtctgtagggctgggagccgagggaagggcaaaggggtcccccggatccagccagggcagagagggggatttcaggtttaggtccagaggagagtgcctccccacagtctggcagtcattagcagggtgatggtgaggctgagatgggcagggccaggctgaggagcagccccactgcggtactggacatccaggtctgggtggttacagccacttttagtacagcaggagacatcaatgtggttcatgctgaaggcgtcacccaggtgggcatgttggcacattgaggcggttgcacagcctcttaccatatagctttggtttttcggttctgaggaaagagaagacggagtgagacttccagctcctgggcccaggactggaattctccagtaggtgacctgccaccttgcagtgggtgccaccttcactaccacctagagaaagcagcagttctcagggccaggtgtggtggctcatgcctgtaatctcaacaccttgggaagccaaggagagaggatagcttgagcccaggagttccagaccagcctggacaacatagcaaaactctgtttctacaaacataaaaaagaaaaaaacagctgtagtcccagctacttgggaggctgagatgagaggatcacttgagctcaggagatggaggctgtggtgagttatgatcacgccactgcactccagcctgggtaacagagtgagaccctgtttcaaaaaacaaataaaaagaaagaaaggaaggaagggagggagggagggagggaagaaggaagggaggaagggaagaagggaaagaaaagaaagaaagagagagagagggaggaaggaaggaaggagaagggaaagaaggaaggaagggaggaaggaaggaagaaagaaagaaagaaagggaaagagagacagagaaagaaaaggaaagaaaaaaaaagaaagaaaggaagcgagcagcggttcttaaagtgtggctcagggaccccagagaccctttcaggagatctgtgatttcacatggctttttcactctcataagtgtacaatgggcttttccaaaaactccaggacatgtgatattgcaagagactgaaagcagaagcttccatgaggacccagctgtcttctattaagctggacattaaagagatgtgcaacacagcaaaataatgccagttttctcattacgctttttttttgtttttttttttgagatggagtctcactctgtcacccaggctggagtgcagtggcacgatctcggctcactgcaacctctgcctcccgggttcaagcaattcttctgcctcagcctcccaagtagctgggactacaggcgcgaccaccatgcccagctaatttttgtatttctagtagagacggggtttcaccatattggccaggctggtctcgaactcctgaccttgtgatctgcccgccttggcctcccaaagtgctggtattacaggcgtgagccaccgcgcctggctggttttttttttgttgtttctttgtttgtttttttaagacagggtctcgctctgttgcccaggccgcagtgcagtggtgcaatctccgttcactgcaacctccacctcccaggctcaagtgaccctcccacctcagcctcccaagcagctgggactacaggcatgcaccaccatgcccagctaacttttgtattttctgtagagacaggatcttgctatgttgcccaggctggtctcaaatccctaggcttaagtgacccgcccaccttggcctcccaaagtattgggattataggcatgagccaccatgcctggctatcattacattttttctttggaaactatacttatttttcattaaaatgttatttatcttaatgtgtaatgagtttttattgttataagatgaattcata[131 bp omitted]aaccccgtctctactaaaattacaaaaataagctgggcatggtggctcatgcctgtaatcccagctatgcaggaagctgaggcaggaggattgcttgaacccaggagggggaggttgcagtgagctgagaccatgccactgcactctagcctggcgacagagcaagactccatttcaaaaaaaaaaaaaaaagatttctcagttttaattttaatttaattttattttattttattttttgggacggagtttcactcttgttgcccaggctggagtgcaatggcacaatcttggctcaccgcaacctctgcctcccaggttcaagtgattctcctgcctcagcctcccgagtagctgggattataggcatgtgccaccatgcccgactaatttgtatttttagtagagatggggtttcaccatgttggtcaggctggtcttgaactcccgacctcaggtgatctacccacctcggcctcccaaagtgctaggattacaggcgtgagccaccactcctggttctcagttttaattttaatgtggcatttatctatagaaatcactgatataaacaataaagagtttttttttttttttgagacaaagtctccctctgtcatccaggctggagtgcagtggggtgatccccactcactgcaacctcctcctcctgggttcaagtgattctcgtgcctcagccccctgagtagctggggttataggtgcacgccaccacacccagctaatttttgtaattttttgtagagacagggtttcaccatggtggccaggcttgctctcatactcctgacctcaagtggttctcctcctcaccctcccaaggtgttgcaattacaggcgtgagccaccacacctggccaaaaataatttttaaaagcatgaagaagttgagaccaaaaagtttgagaaccactggaatacagagacctttccaggacaccacaggatgaaagcccaagatgtcttcagcaaatccccacaacccacgagaaatccaccaaagaattccatttttctttttgtagagatgggggtcttgctatgttgcccaggctggtctcaaactcctggcctcaagagatcctccggcctcagcctcccaaagtgctgagagtacaagcttcagccaccgcacccagccggaattccacttttccatggcaaaaatgtccacatcctgatggacaagtcctaattccttacaataatattcacccacctgaaggaaatcccaccttttccacagggagacccaccacagttaactccagcttaactggaagtcaatctcttgcggaactctccacccccaataagtgttccctcccagcctcggagagggcctcaccgtgagtgccggtggctaccagacattgattcatggggcctcggcagtcaatgaggaaagtctcttcagaggagcatccatgggtgctgttccccttgcagctgtaacactggcggccattctgcggcagattttcaagctccaggacttaggagaagaccagagacacagagaccaagaaaattagtgcttggatctccacttccttgaatgacctccccaggacttccactccgagccagagatgtcatggagccaccttgtggtcaggcgtctgaatggcatttggagggggatggttttcgagggcttgagagaaaccccaactttcaactccccatgagtcccatttctggccaggcaccgtgctgggtgctgggtaaaactatgtaagatgaaactgtccttgctctcacaaaagttacaacttatttatttatttttgatacagggtctcagtttgttgcccaggctggagtgcagtggcgcaattgtagctcactgcagcctcgaccaccccggctcaagagattcttccacatcagcctcctgagtagctgggactacaggcgtgcaccaccatgcctagccaatttttctgttttttgtagagatggggttttgacacattactcaggctggtctcaaactcctgggatcaagcaatctgcctgcctcagcctcccaatgttctcggagtacaggtgtgagccactgtacctggccagaacttacaagttattactattattattactaaaaaattttttttgagacggagtcttgctatgttgcctaggcttgtctcaaactcctggcctcaggcgaccctcccgcctccgcctccaaaagtgctgggattacaggtgtgagccactgtgcccagccagaatttacaatttagagctacactacccaatctggtagccactggccacatgtggttgtttacatttaaataaattaatattaaatcgaatcttaaaattcagttcacatttcaagtgctcactgaccacatacagtggtggctgtaatattggacaggacagatagggaacatttctatctgttgacagtgctgggtaatagagacagggatctagattacactggaggggagggacagtgaaagcatccctgaagatgatacattaaagctgaggcctaatggatgagaagttgccagcagggtgaactcttggggaagatgtgttctaagggaggatattcatctgcaagggccatgagaccaga[133 bp omitted]cgccactgccctccagcctggctgacagagcgagactccatctaaaaaaagaaagaaaggaagaaagaaagaaactaaatgaaggccaggtgcagcggctcatgcctgtaatcccagcactttgggaggtcaaggcagaaggattgcttgagcctgggagtttgataccagccccggcaacatagtgag[137 bp omitted]cagtgaaaccctgtctctactaaaaatacaaaaattagccaggcatggtggtgggtgcctgtagtcccagccactcgggaggctgaggcaggggaatggcgtgaacccgggaggcggagcttgcagtgagccaagatcgcgccactgcactccagcctgggcaacagcgcaagactccatctcagaaaaaaaaaaaaaatgtagctgggtgcaatgatgcgcatctgtagtcccagctacttgggaagctgaggtgggaggatcactggagcccaggagtttgaggtggcagtgagccgtgattgtgccactgcaccccagcctgggtggcagagcaagaccctatgtctaaagaaaacacaaaaccccaaaaacgaatctaaacaaagactgtgaggcagacaggtgccagattacataggccaacagaataaggtctttggatcttattctaagaggaaggggaagtcattgaagtgcctgagaaaggagggtgacatgatctgatttacattaaaaaataaaaaattggtggtgcatggtggctcatgcctgtaatcctaacactttgggaggccaagcccaggagttcaagaccagcctgggcaacaaagcaagaccccatctctaccaaaaatacaaaattagctgggtacggtggcatgcacctgtagtcgcagctactccagtagcttaggtgggaagaattcctgagcccaggagtttgaggctgcagtgagccatgatcatgccagtgcactccagcctgggtgacagagcgagaccctgtcccccccataccccccaaaaaatcactcgctgctgggttgagccttggctgtagggtggcaggagtggaagcagggagaccagagaggaggtcattgcaacaacctgggcaagaagtcagcgtggctcagcccaggtggtggcagtggagcaggggaggagtgggaaaatttgagagagacaaaagagacaggaagcacaggtcttggcgagggctgatagtatcattgaatccttacgaagttcttctttgaagaaaggcctggctgggtgcagtggctcatgcctgttaccccagcactttgtgaggctgaggcagacagatcacttgaggtcaggagttcgagaccagcctggccaacatggtgaaacccccatctctactaaaaatagaaaaattagccaggggtgatggtgggcacctgtaatcccagctactcaggaggctgaagcaggagaatcgcttgaactcgtgaggcgaagtttacagtgagcggagatcacgccattgcactccagcctgggcaacagagtgagactccgtctcaaaaaaaaaaaaaaaaaaaaaaaggcctgatactcccatttttcagaaaagcaaacagaggcccagagaggacttgattgccagagagtgactgcgcagctgtctgcctgagtgcatgcccctgcccgaccccaggccttgcctgtgtctcccgttccttacttgggccctcgttgcatttggtggtgttgcagcatttcaggaagtggaaggtgtcgttgttgtggaaaccattggagcccgggcagccgggaaggtagccacagccacggaggtggcggtcatcctttggacgccctatgggggccaggggacagaggtcagatgtcagattgtgaatgagggactaagatgggatttgcccgaaatagcaggcattcaaccattctctacttcacccttcatcataagaccctcattttatctagaacagtcatagatcttgtcgaaaactacatattccagcctctccaggtagtcatgtgatgaagttcggactaatgtgatataaatagaagtgctttatgggacttccagaaaggagaacccttacaaaaggaggagtgcccccttttttgtcccttctttccttcttcctccttcctggaacttagatgtgagacccggagctctggcagccattttagactatgaggcattttgagaatggaagtaatgtgtaagaaacaagagggtggccgggcgtggtggctcacgcttgtaatcccagcactttgggaggttgaggcgggtggatcacaaggtcaggagtttgagaccagcctgaccaacatggtgaaaccccatctctactaaaaatacaaaaattagcaaggcgtggtgatgcacacctgtaatcccagctattcaggaggctgaggcaggagaatcacttgaacctgggaggcggaggttgcagccagccaagatcatgccattgcactccagcctgggtgacagagagcaagactctgtctcaaaaaataaataaataaataaataaaaagaaatgagaaggcatctgggttcctggtgactctggacctgtccttgtggccctggacttcctatcactggacctcttgtgtatgagagaacttagtcccttgctgacatccctgttactttggggttgtttgttaagtgcagtcttagggaggagcagagcagggaggaggagttgccagcaggttggggctcaccttcttcaccttcctggatccagtgggtcaccacatccaggcactgttcttcagggctgcggcactgcaggctctggtgccggcccctctcacagctcatgtctgatgagccacaggaaatgcattcgaggtaacggcttcgggaataggtgacagcccggcctgtttggaagagggggaggggagtgagactccatggggacagtcctggagccccagctctgcaaggactcactcaaaatcaattcctccttatcccaccctgcagccagtcattgagccctgcctattctgcctgctgaatctttctagaatccaccccctcctttccagccccatggaccagtccagctcagacctccttcaactccagctacctccctagcctctgggtttccattcttgtcaccccctactcaccccagtgcagcatctccacatggccctagaaacatttctttcctttttttttttttttttcccgagacagagtctcactccgtcacccaggctggaacgcagtggcaccatcttggctcactgcaacctccactccccgggttcaagtgattctcctgcctcagcctcccgaatagctgggactacaggcgtgcaccatcacgctgggctaatttttgtatttttagtagagacagggtttcaccatgttggccaggctggtctcgaactcctaacctcaagtgatctacatgccttggcctcccaaagtgctgggattacaggcatgagccactgcactcgggcccttagaaggatatttctaatactcatatctgaccctgtctctcctctgctcaagactcttccatagctccctactgccctgaaaataaattccaagatcctcagcatgggattcaaagcctatcaaatactggggcctgagcacctctcctgcctcgtctccctccactacaccctgagactctgctccacactgacttcccacagtctgcgacgacacatgttccctggcatccaggcctttgcatatgccgttgtttctgtctagaacacctttcctttgctctctgccttccctaactcctactcattcttcaggtgtcagctctaatttcacctcctctaggaagcccttcctgatccaccaggctcccacacacccctgtactcccccatcccactctgggtggtcactgtctggtgacaggtatgtctcctctactggactgtgagcccccaggagggcagggccaggggctgtcttgatcactactgtgtcccaacaccacctggcacatggccagggacagataagatattcaatgcatatttgttaaatgaatgaatgaatgagcaattacttaaaacccttctattgttccctgtggtagcctgtctccaaaatggcccccaataatctctgctccctggtattcatgcccttaaagaatagggctggctgggtgcagcagctcatgcctgtaatcccagcattttgggaggccgaggtgggaggattgcttgagtctgggagtttgagactagtctgggcaacatagcaagactctgtctttaaattaaaaaaaaaaaagaagaagaaaagaataaggatgccctatgtagtcaactggatattatggaaatgatggtgtatgccttctgtggctagatcatagaacacatgcctggctctctcacttggatcactttttctggggcaagcagcagccatgttgtgaggacactcaagtagcaccatgggaaagttcacgtggcagaactgaggcctgtgccaaagccatgggaggggagcattcatgtgagtgaagctaccttaggagccttcagatgactgcagccccagctgacatctcgactgcaggctcatgaaggatcctgagccagaaccacctagctaagccactccagggtttttgaccttcagaaactttgtgaaataacacatgcttattttattgctgcaatctgtaatgcagcaatagataatagataagcaatagataatacactacctaattgtcccagggatcaaagactcacttgactgattcctgatcacttcgccttttgcacgaaccttgtggtgttggccaactggatccgttacttttccctggaaacaccagagtcattcctctacccagcccttggctcacaccatttcccatgcttggcatgccctccccgtcctgacccaagacacatctaagctgagtccaggccaagtcttaaaaaagtgagaggaccatgtcagccaaggttctcaactggcaggccgctagctgtaattaggcgaatcatttacatccaaagcccaatcgtccccctcaaagaaaaataactacaaggccacccacgtcttctcacacaaacttccatgaaaatgaaaacacaaattctcaccattgccaacatagctgttcatacctagaacaccttttccttgagccctactttctctaactcctattcattcttcagctgtcatcttcaatttcacctcctctaggaagccctccctgacccatcagcctggaacgggtacctgctctgagctcccactgccccttgaattccccatttctagttctgcccactctgggtggtcactcatgggtctctggtgtgaactcttgtaaatgccaatgatccttagggctattttcctttttcttttcttttctttttttttttttttgagatagggtcttgctctgtcccaaggctggagtgcagtggctcactgccacctcgacctccctgagctcaggtgattctcccatctcagcctactgagtagctgagactacaggcatgtgccagttcacctggctgattcctgtatttttgtagagacaaggtcttgctatgttacccaggctagtctcgaactcctggactcaaatgatcctgccgcttcggcctcctaaagtgctgggattacagacgtgagtaccgcacctggccagggctctgttttaagccctttttatctctcacagtatagactctctcatggggtaaatattgacatgacttcatttccatctatctgctcatcactcacaaatctctctctagtctagacttctctctgagctccagacacgcaactgtctcttcgaggccccatggctatacctcaaacacctgtcctaaacaaaactccccatcttctcccacaactgctctttttcttgaagtccacgcgtccaaggcggccccatccagtccccggggcagaaacctggcagacccccttatcttccacatctgtgcatcaaccgacatgcttctactgttctgtcttctagctccttaatccttttgctctgctgtttctgacctctatcaagcataactgccgagttcttcatttgagtcactgttctatattttctgttggactcttttaaaaaatggattccaggtgctaaaacatatcctttcttctgttttcctgaatatatcgattgtagcaattttcatgtttcctgtcctataatccaatatctgagttgctacaattctgtttctacagttggatttttctcttggtttctggtcaattggtcccttttattttcttcaggataccttgtaaggttttttgttactgttttttattttttgttttttgttttgttttgttttgagacagagtcttgcgttttgttttgttttgttttgttttgttttgagacagagtcttgccctctcgctcaggctggagtgcaatggtgtgatctcggctcactgcaacctccacctccctggttcaagcaattctcctgcctcagtctcccaagtagctggtattacaggtgtgtgccaccatacccggctaattttttttttttttgtatctttagtagagaaggggttt[132 bp omitted]tgctatgttgtccaggctggtgtgcagtggctattcataggcataatcctgctactgatcatcacaggagttttgacctgctccatttctgacctgggctgcttcaacccctccttagacaacctggtggtcccctgctcctgggagatcaccatattgatgccaaacttagtgcagacacccggttgatatagcacactacagcccagaactctcaggctcaagaaatccttccaagtagttgggactacagacgcatgccaccatgcctagctatcttgtaaattttgatcagacgccagacattctagataaaaatctgtcaagggcctaaacgatgttttcttcttccacagagagtcaggttttcattcctgtcaaggactggacctaggcttgtttagggctggtctatttcactttggcccttacccctggggtggtcttagggggaaagcctgagatgcttaccaaggcctcttcagcttggcaacctgtgtccccagcatcacatgtctgctggaagccttgttcgcttttgtagcttcccagttgctatttttctcttccaagtttcttggactctcaccctgtgcatgtagagcttgccaatgacttgagggagatttgtttgcaggttgggaactcccttttctgtggtcccatccattccaggattttaactctcatcttccagacattctggcagccccaaactccaacctccgtcttctcagtctagcgactctctttccgtctgggctctatttcccttccacagcagcagattggcaagtgcgctccgggaaaaagccaggttgtctgtggaacccaaattctacacttctgttatttcagagattgtagcgcctcaagtttctcctttctttcttttttcttttttttttttttgaaatggagtctcgcgctgtcgcccaggctggagtgcagtcgtgtgatcttggctcactgtaacctctacctcccgggttcaagcaattcttgtgcctcagccacccaagtagctgggaccacaggcatgtgccaccacgcctggctaacttttgtatttttagtagagacggggtttcgccatgttgcccaggctggtcttgaactcatgagctcgagcaattcacctgtcttggcctcccaaagtgctgggattacaggcatgaaccactttgcccagccaagtttctcctttcatttgctgctctccagtgacttccaataattgtttattatttgtccagcatttgcaactgtcattggcagaagggttggtctgatacaagtgactccatcatgaccagaattgcaggtcccctcccacatctaatccaccactaaggcctgcttcttaatagctcttgttcggctttggttgagacagggttttgctctgccgcctaggctggagtgcagtggcgtgat[131 bp omitted]cacctgacaccctagtcctgctgccctcttctccacctggacaacctcgcccacccccaagttggtttcccctcatctactcttgcttcctttcagtctatcttctgtcctgaggtcagaataatttgttaaaaatataaatgggggccgggcgcggtggctcacgtctgtaatcccagcactttgggaggccgaggtgggtggatcacgaggtcaagagttcgagaccagcctggccaacatggtgaaaccccatctctactaaaaattcaaaaaaattagccgggcatggtggcgggtgcctgtaatctcagtttcttgggaggctgaggcaggagaatcacttgaacctaggaggcggaggttgcagtgagctgagatcgcaccattgcactccagcctgggcaaaaagagcgaaactccatctcaaaaataaataaataaataattgcgatcatgacattcgctgtttaaaatcttctgtgatgccccagtgctcccaggacaatgtctagaaacccctgtgtaacatgcccctgccaagctttccagctcatctcgccccactgtactgtttcctttgtccagccacactgcttttggccacctttgtatctgctgctccctctgctggaaaaccctttccactgtttttttttttttttgcaggatctcgctctgtcacccaggctggggtacagtggtgcgatcatagcttactgcagcctccaccacctgggctatagtgatcctcccgcctcaacctcccaaggagctgggatcacaggcatgtaccatcacatctggctaattttttaatttttttgtagagtcatgttgcctaggctggtctgaaacaatcctcccacctgggcctcccaaagtgttgggattacaggcgtgagccactgcacccagcctccattagctgtttaatagtctgattcctactcatccttcaagatccagcttagctgttgcttcccctaggaaaccttccctgacctgagtcaggtatctcctctagggtcccacagctcctactcttccctcatcccagccctgacccctctgcctgtgtttcccccttcatagcccagacaaatctattaggttggtgcaaaagtaattgtggtttctgccattgcttttaatggcaaaagccacaattacttttgcattaacctaataatcagtcactgtctggtgatggatgggtctgtcacccctacacacacacacacacacacacacacacacacacacacacacacacacacacaggactgtgagtcccatggagtcaggcagggcacaaggctgtcttggtccctgctgtgttcccagcatcatgtaagtactgagtgcagtttaaccaactatgcaagttgccacaagcagggtacaatggcattagaaatggggatgaggccgggcacggtggctcacgtctgtaatcccagcactttgggaggctgaggcgggcagatcacctgaggtcaggagttcaagatcagcttgaccaacatggagaaacctcatctctactaaaaatacaaaattagctgggcgtggtggcgcatgcctgtaatcccagctacttgggaggctgaggcagaagaatcgctcgagcctaggaggcggaggttgcagagagccgagatcgtggcattgcactccagcctgggcaagaagagtgaaactccatctcaaacgaacaaacaaacaaaaaaaaaaaacaaaaacaaaaggaaacaaaaaaaaaaagaaagaaaaaagaaaagaaaaagggatgatataggtatctcagttattagattcctgaattgatagctgctgctctaagctcctggtggatccctgaccactgccaactctctccccaggacccttcatgtccctgtgacccatcatggaaaggggcaacaccaggcccagcagcggactccaggagtttgtcccagcactgaccaatattgttaaatattttcgctatcatctctgattgaatgcactacttagacccaagtattggtgctttccttaagcacatctcaccgagacgggaagcccacatcctctcgtcacttcctcaaaacaaacatctgatttggccccaccagcggattagtgtttgaggtcaggatggatgaaaaccaggcagaatcaggatgaatgaagaacaaagaaaacccagtgcaaacgcagcactctgctcactgatgtcaccaaccatgactagactggccttaccctatttccttcctcaccaggtccagaaagaggaatctctttcacggatggatccatgcaccatggacccattccttccccacccttcctctcctgtgggaatttaggaaaatttgaccttttctaagtctttttcttaaaatgatcagagcctgaagccatgaaattcgacaaaggggcttatggttgttgcccaggctggtcttaaactcttgggctcaagcggttctcccgccttggtctcccaaagtgcttggattacaggcatgagccaccacacccagcctattatggacatttcctcacatttgttttttcactgcccaagtcagagaccatctattgcagaggattctcccagcctactgcggcccatttaatcttcccctctttcgacttcccttaagaacgtcaagtctttgcttgaatcctggcccctcagtatctattgcttggaccatctcccgtcccaatggattgggcaggaccatctcctgcccagtcagatggacaaacatcactgagacatctcatctatgtctcatgcatgcgtgtgagcttgttaagggcagagttgcaagttatacataacaaccatacatacaaacatgcaggatggggattgggttaaggatgaaagtaattgtgtcgttggggtggggatttgggtagtctgagataaggatggggttgatttggggatggggttggaactgtgcttggaacagggctgggtttgagttgggaacagtgttagggtaacatgaagttgggcataggattggaggtgaagttgagttggggttggatatggggtcaagaatgagttggggatggagctgagctagagatgggttgggttggggttgggacttggataaggcatggagttggggttcagctgatgtaaagttaagaataggattgggatgatgatgaggttgagctggggatggcttggggttggggatggcaagggctgccctactcaccagagttgccctggttgcacaagtctaacccacacacaacctcggtaaggctggtgatcttcaagccagtccgatagctcagggtcctgttggtcttctctgagtgggtacagcttttctccaccagctccagctcttctccttctgcaaggaggggatcttcattaccccagaggctcctctcagctcaaccagcctctgacactcctggtctcaaggtcatccactcccagggctgatctctgctaggcctcttctgttatttgagtcgaactctgtctttttctagagttaaccttgcctccacccccaccccaacaaggagcctgctctattttatttcaattaattaattaattaatttttttttccgggagacagggtcttgctctgtcacccaggctggagtggtgcaatcatagctcactggagccttgacctcccaggctcaagcagtcctgcttcggcctcccgagtagctggaaccacaggcttacatcaccacaccctgctaatttttaaattttttatacagatggcatctcactatgttgcccaggctgatctcaaactcctggcctcaagtgatcctcccaccttggcctcccaaagtgctggaattacaggtgtgagccactgtgtcccactcctgctcttgtagtgacagcactacaactgggactttctggatccatctatccctcccccacaccctcagcttagtgatctcagtactgagatgcctcaaatgtaactttattttatttatttatttattagaaacagggtctctgttgtcccagctggggcaatcatagctcaccacaacctcgaacttctgggctcaaggaatccttctgccttagcctcctgagtagctaggggtacaaatgtgagctactgtgcttggcttcatatactgttgtttcatgtgttcttaaagcttataaaaaacgtatcatattctgcaacatttttttccctctcaaccttaggtttctgagatgtgtccacattggtatctgcagctctatttccttctttaagctgcagtagagcgctccattatgtaattattaccacagtgtttctcttctgctgctgacttgctgactgacataaagtcgtttccattttcttcttttctttctttctccccttccttcctccctcctccctccctccctccctgcctctctccgtccctccctcccttcctctctctctttctctctctctctcttcctttcctttctttctttctttcttgagatggagttttgctcttgtcgcccaggctggagtgcaatggcacaatctcagctcactgcaacctccgcctcctgggttcaaacaattctcctgtctcagcctcccgagtagctgggataactggtgcctgccaccaagcccggctaatttttgtattttttagtagagacagggtttcaccatgttggccaggctggtcctgaactcctgacctcaggtaatccacctgcctcagcctcccaaagtgctgggattacaggtgtgag[131 bp omitted]tcctgtctcagcctcccaagtagctgagattacaggtgcgtgccaccacactcggctaatttttccttttttgtgtgtgtgtggagacgggtgtttcaccatgttggccagcctggtcttgaactcctgacctcaagcaattcatccgcctctgcctcccaaagtgctggaaatacaggtgtgagccagtgcccagcctgtttccaattttccatgtcacaaacattgctgctaagaacattcgtatacatgtgtccctgggtatatgtggccaaggttctttggcatttctgcatggcgaggagttgagctgtagcatatgttaatcttcatctggactagatattgccgaatcgctctaagtggttgatgtgccaatttactcccccaccacagacacggtctgcaactccacatccttactaacccgggtattgtcagatttttaaatgcttgccaatctggtgggtgtgaaatgggctctccttgtttgtttgtttttagtttgcatgtcccagttactggtgaggaaggtttctcaatcactcgcgttccatgctgcgctggaggggtgtgtgggttggggggaagctcaccttcccacaagcgcacgatcgtggtcctgcagaggtcctgtcccagggcgcactcttccacacggcaatccccgttggtcttacactgcatgcaccgcaggccccaagaggctgggggaaggagggagaggagaggagaggttaactacgcttagctccaagacccccgctcacccctgcatgtcccaataccaacaccaagtctccaggccccgtccattcagattcgtgtccatgttctgctgggttccggccggcggtacttccagtctgtccgttgtccacgttctacctccaccccactaactgaacgttctatccctgcccacaagtcctttcccaaagtcctgccttggcccgtttttcctttcattctgtcctcgtgaggcgtatatcctgacagtcgtatccccgccctctctatcagtacgttctattcctgctcctattaggtctttctcaccgcaccggccctcggtcgattacgcctctccagttctgctggggacgttctagccttgccccacccgcgtcgatctttatgttataccgtcactcccagtgccctaatggaactatccctccactcactccccctggttctacccggctccagagcctctcccggcccactaatttattcccaaattctaggcccggccccatcagccctccggagtttctattgttagatactctagtttcccgcgaagttctgtctccgccctccagctctccaactaggttttggccccgctccagactcatcgtcgaggttctagccccgccctttagctcttcctgaccttatcttcccgccccctagctcctccccgatgccataaccccgcccctagctcctcctcgaggctttagtccctccctctagctcctccttgagattctaacttcgccctttagctctccccgcccctagttttcccctgaggtcataactccgccccagtcccttcttgaggtttcagccccaccctgtagctcctccccgaggtcgtaacccccgccccttggccccttgaggtcctagcccagccccgtagctcctccccaagcttataaccccgcccctagcccctccttgaggttccagccccgccctctagctcctccccgaggttataatcctgcccctcaagagtctagtcccaccttctagctcctcccgaggttataactccgccctctggttacgcctcgaggttataaccccgccctctggctccgcctcgaggttctagccccgctcctagctcttcctcggtctgtaacctctcccgtagctcttccttgaggttccagccccgccctctggctcctccccgacactctctccccgccccaggctccgccccgagattgcagcccagtccctaggcccggtccccgacctccgggccttcccggacatccctttccagctgcgcgttcggagtatcccggagctgttactcattcccggcctcccgcggtctcgagcgctttccgggttattcatcgcggccccaacaccctgtggccacccgccctgactcagttccttctcgaattcctcgacccagagccccccacattttccggggaagtaagtgagagtcgcctcagtgagagggaaaggtcctgagggacagtcccgggtctccagcactggctctgcgccgctcagtcagcctccctttgggccttttgtaaaagggggtcctgtccccccgtttctcagagggggagacccagcagcgtggagagcgctggggggcgctgcagggtcagatcctgcgtattcaagcactggctgtgtgattttaggccagttatctaacctctctgtgccctagtttcctctgcgaaacgaaattaataaagtcccatcgcctagtttgaaattgcaaggaagaggcttcgaagaactccatttaaaaaaagaacacttgggccgggcgcggtggctcacgcctgtaatcccagcagtttgggaggccgaggcaggtggatcatctgaggtcaggagattgagaccatcctggctaacagagtgaaacccggtctccactaaaaatacagaaattagccgggcgcgatggcaggcgcctgtaatcccagctacccaggaggc[136 bp omitted]atgtaaagctaaatgcctttgctccactaatatttccttagctactgagtgccaggtactgcgccgcgtggcgttgcacaaagcacgagaattactattatttgattagggaggatgctgaggactgaaccgcattcctccaactcatcctctgacaacccccaaccccctcaattagaccctgttccaggcgcaggcgttcgggacccagcccctacctgggacgcaggtgtggagcagcagcagcagcggcagcagcggcgggtgacccatgtcgcgagggcagctcctgtgcgcggggtccctgcacgtcttctctccttctggcctcaggaaggaggcagttttgtggccccagggactcctcccagacgttttgcgaaagagcgagtcagccccagatgcgtgggcgcctccccctcctcccgtacgaacctcctccgccacaaacttcccttcccggggcgcggccggctggtggtgaaggggctggctcggccctgactcatggagttgtgatcacagctctgtccccagattgcctgggtgcaaatcccagttctctctcttcctaacgtgggacccggggcaatcgctctccactgctgtaaaatgaggataaaaactttgacggtaaatatgaatgtggctgattatttggctaacaggatttttgttagttttgtcaggagggatactggtattttggaaaatgtccttatctagagatgcatcctgaaatatgcatctcttaaacacttaaaacacttaacccttgctttgcttcccgctgtgcccccagctcctggaccagtgcccagcacgaagtaggtccttggtaaatgttaaaggaatgtgttgagccctcc[134 bp omitted]gaatcgcttgaacccgggaggcggaggttgggttgcagtgagccgagatcgtgccactgcactccagcctggcaacagaacaagactccttctcacagaaaaaaaaaaaaaaaaaaaaaaagacacttcagccaaaaaagtagatatcactgttacgacaatggctgtatgcttaggtgggattctggtttttgtttgtttgtttgtttttgcagatgcttactagagtatttagtggtgaatgttattgatgtctgcattttttgttgttgttgttttggggatttttgttttgttttttctttttcttttgttttcattttgatgtctgtatttattttataatattttagaagaggtcagatgaggtggctcatgcctgtaacaccaatgctttgggaagccaaggcaggaggatcacttggggccaggagttcaagatcagcttgggaaacataaagagccctcatctttccaaaagaaattaaaaataaaataaaattagctgggtgcagtggcccgtacttgtagtcctaggtagttgggaggctaaggtgggaggaccgcttgaacctgggaactggaagctgcagtgagctatgattgcaccactgcactccaacctgggcaacagagcgagaccctgtctcaaaaaaataataaataaataaatacttgagtagaaaataaaggcaaaatagccaaatggttgtatcaattatataaaggtaatcagtatataagggcatattatgccattctgtctccttttctgtgggtttgaaaaggcttataataagttttttctttctttttattatttatttatttatttattgagacgaagtctcactctgtcacccaggctagagtgcagtggtgcaatctcggccactgcaatctccgcctcctgggttcatgcaattctcctgcctcagcctcctgagtaactgggattacaggggcacgccagcacacccggctaatttttgtatttttagtagagatggggtttcaccatgttggtcagggtggtctcgaactcctgacctcaggtgatccacctgccttgtccttccaaagtgctgggattacaggcatgagccactgcacctggccaagttttttttttttttaagtaaaataaaatactaaagataaaattgtctccccgtcttaggatgcatctaactaaacagagcaatttaatgtaggtgcaatgcctggaatagctgctggccgaaatggagggctcaacacattcctttaacatctaccaaggacctactttgtgctgggcactggtccaggagctaggggcacagcaggacgcaaagcaaagttcccaccttttgttgtgttgacagtggggagcagatatgtgttatctaatctttcactgtctgagagggataagcaaactggagaaaacaaagcaggctgaaggaagtatctgggtgcaaatgaggtgtgagctgttttaggtgggtgatccaggaggggttccctgagcaagtggcattcaagcagaggctgaatgcagtgagggaagaagtagggcagatgggcagggaacctttccaaggagcaggaacaaccagtgcaaaggccttgaggtggaagcctgatgagattctaggaacagaagagatgtcagtgtggctggaacagattaggagaggaagagagtcgtaggggatgagtaagtggtagctacttctactgctgtaataatgattatactatgtgatttgttgtcgttgttgttgttgtttttgagacagagtctcactttgtctcccaggctggatgcaatggcgtggtctcggctcactgcaacttccacctcccaggttcaagggattctcatgcatgcctggctattttttttttttttttgagtcggagtttctttcttgttacccaggctggagtgcaatggcacggtctcggctcactgcaacttctgcctcccaggttcaagaggttctcctgcctcagcctcctgagtagctgagattacaggcattctccaccatgcctggcgaattttttgcatttttagtagagatggggtttcaccatgctggccagactggtcttgaactcctgacttcaggtgatccacccgcctcagcctcccaaaatgctgggattacaggcttgaaccactgcgcccagccctaatttttgtattcttagtagagatggggtttcgccatgtcggctaggctggtctcgaactcctgacttcagatgatcaacctgcctcagcctcccaaagtgctgggattacaggggtgagccaccgcacccggccctaatttttgtattgttagtagagatggggtttcaccatgtctgccaggctggtctctaactcctgactacaggtgatccacccaccttggcctcccaaattgctgaaattacagacatgagctaccgcttccagcctgtactatgtgattcttactaactcattgaagctgtaagctaatgattttaagataaggttagaaaacaaaaaacaaaaaaactcccaatggtgagcacagtggttcatgcctataatctcagcactttgggaggcgaaggctggaggattgcttgagctcaggggttcgagaccaccctgggcaacatagtaagaccttgtatctataaaaaaataaaattacagcctggacaacatagcgagaccttgtctctatgaaaaatagaaaaattagccaggtgtcgtggtgcacacttgtggtctcagctactctctggttgaggtgggaggatcacttgagccccaggggtttgaggctgcagtgagccaaaatcgagctactgaactcgagcctgggcaacaaaagtgagactgaaaaaaaaaaaaaaaagaactcccagagaatttcctaagaggtagtatagcccaatggttaagagtgtgggagctggtctcagattgtgaaaatctaaattgcatctacatattggctgtgtcacctctagcaggttacttaatctatctctgtgcccaagccccttatctggaaagtagagatagcaagtatcaccctcccagggctggtgtactgcggaggtaaaagaatccacctaaaatgactgagcatggtggctcatgtctataataccagtgctttgggagaccaaggcaggtggatcacttgaggtcaggagttcaagaccagcctggccaccatggcaaaaccctgtctctactaaaaaatacaaaaaaattagctaggtgtggtggcatgcacctgtagtcccagctacgcaggaggctgaggcacgagaattgcttgaacctgggaggcagagattgcagtgagccgagatcgcaccactccactccagcctgtgcgacagagctagactccatctaaaacaaacaaacaaacaaacaaaaagaagaatgctcctaagatgcttgccacagtgcctggtacatagtatgtgctcaataaaagcgatagctgccagtattatcattgttgcaactctggacattcacctcttcctggagtaggaagggagatggaggcctgtcattgagtctgacgtcaacagttatcacgcgtcagctgctgaagtgggcacttccctggctgggtcaccctgggccaatgacattcttctttctgagcctcagttttctcagctggagaaggggatccctcttgggctggtgtgaaaactaaactagatcggaatgtacatgaggtggggaaatagacagttggggtgttggtccaagcaggcttgagacccagctcagccacttgcttctgggtgaccctgggcagatggcttcactccatcaatccccggctttgccacctatgaaatgggtctggggtgggtagggggcatctctcagtgaagagaaaactcaggtttgagggtcatgcggagctgtgtgctgtgctgctaccac[134 bp omitted]cccacttcagcctcctgagtagttgggacctaggggtgtgcaccaccatgcctggctattttctcatatttcgtgttttttgtagagatggagccttggtctgttccccaggctggtcttgaactgctgggttcgagtgatcctcccgccttggcctcccaaagtggtgggattacaggtgtgagccactatgctcagccaatttcctctttaacgaatgagaggtatttcagagcccactcatccctgcccaaggctgccctcgcctcctgaaatttctgtctctccctgtgtctttgtctttttctatctctctgttttgttgttttctttgtctctgtccctctttctctctctcaatgcctatctctctctctctccaactctatcactttctctctctgtacctcgatctctgtatctgtttgtctctctcttcatgtctttttatctctgcttctcccttttctctgtctctccccatggctctctttctctttctgtgtcattgtttctgtttctctttctgattctttctctctgtctctccctcaagtgacacacacacacacctgtaaggttctgctgacgtgtaaagggaagggaaatgcagggatcaggacctggacactctccagaaacacggcagggatgtcggctccttcctcctcgtgactcacctgggcctcacccagctcttgcctgcctgcgggatcatgggtgaggcccatgggtttcgggggcttccccagcctgtggagaggagaatttcaggcagagacagagagggtgatagaggaggaggcaaagagagggagagacagagagagagagagagagctggggatagagatggaggtggggaaacgagggagagggagagagaagagacccacagacagactggctcaggggaaatctgagatgggggtgtggggggagtgagagagacagaaaacagcaaccgaagaacaaggacagggagaaagaaaaatgggcaagcagggagagagagaagataagagactgacagaggagttagagaaaacaacacacagttgccttcagagaacacaaaatagacacagagatacagggacactgtgtgtgtgcgtgtgtgcatgtgtgcgcgtgtgtgcatgcgtgtgcatgtgtgtgagtgtacgtgcatgcgtgtgtgcgcacacatgtgtttgtgtgcatgtgtgtgcatgtgtgtgtgcgcgcacgtgtttgtgtgcctgtgtgtgtgtgtgtgcatatgtgcatgtgtgagtgtgtgtatgcatgcatgtgtgtgagtgtgcctgcatgcatgcgtgtgtgtgtgtgtgtgcacctgtttggggctccctcatcctcttgccacctgccatgatgaagtgactgccctctggcctggccgctgggaaggtccttctctggttggggaggtgggggggatggggggtggctgagctgatggtagggaaagggccatcgctcataacctcccctttctgggacgcctaacaggccacactgatgtggctttcagatcctggcctggacacctcttagatgtagaggacctctccactcagggcctccctggggagtggaagagctggtaaacccttgagtccaataaccctcttcccccgttttccaggcagagaaactgaggtccaaagggaagactttttatttttttgagataacgtctggctttatcgtccatgctggagtgcagtggtgagatctcagctcactgcaacctccacctcctgggctcaagccatcctcccacctcagctgcccaagcaggtgggatgacaggcgtgcactaccacgcctggctaatttttgtattttttgtagagacaacatttcaccatgttctccaggctggtcttgaactcctgagctcaagcgatctgcccacctccacctcccaaagtcctgggattacaggcatgagccacggcgcccggcctaaaacaggagactttaaatgagtttctccccgtctcaagtttattgtgtttgtgttacagtgggtactgttttgagagtattatctatattattggtgaatctgtaaatatcctatttcgtacacacacacggaaactgaggattagagaggtgtggtgggctgagagatggtccccgaaaatatccaggtcctaagccctggagcctatgggtgttaccttaaaggaaaaaagggtctttgcagatatgattaagttaaggaacttaatcaggaacattttcctaattatccagatgggccctaagtgtaatcagaagtgcccctggaggaaggagggacagggacatttgactgtagacagaagaaaagtaagtcatgggagagaagcagaggaaaacagggtgggagacagaaggtatttgctgcgggctttgatgatggagaaatggccaagaaccaagaaacgtaagaaatgcagctcctgctggaaaacgacaaggaaatcactcaccccggacatctcttgaccagggcactgctctgctgacaccttgattttgattacatgagacacattttgtacttctgacctccagtctgtgagagaataaatttctgttgttttaagccactagatctaagctaatttgttacagcaaaataggacaccaatacaagaggttaactcacttgcctaaattgagctgatattttttattttttgagacacggtcttgctctgttgcctaggctggagtgcaacggcaggatcatagctgattgcggcctccagttcctggcctcaagtgatcctcctgcctcagcctcctgagtaactggaactacaggcccatgtgaccaagcctggctgattttagagagcttttttgtttgtttgtttgttttgaggtggattctggctctgttgcccaggctggagtacagtggtgcaatctcagctcactgcaacctccacatcccaggttcaagcaattctcctgcctcagcctcctgagtagctgggattacagatgcctgtcatcatgctcggctaatttttgtattttagtagagacggggtttcactatgttggccaggctgggcttgaactcctgtcctcagttgatccactcaccttggcctcccgaagtgctgggattacaggcatgagccatcgtgtctggctgcctggctgattgaatttttttttttaatagagacggtgggggagggtggggggtctcactatgttgcccaggctggtcttgaactcgtggcctccatcattcctccagtgttggcctcccaaagtgttggaattaataggcttgaactaccacatctggcttctaaactgacttgttaggccaggtgtggtgcctcatgcttgtaatcccagaactttgggaggccgaggcggaaggatcacttgaggtcaggatttcaagatcagcctggccgacatggtgaaaccccgtctctactttaaaaaaatataaaaattagcctggtatggtggcaggtgcctgtaatcccagctactcaggaggctgaggcatgagaatcacttgaacccgggaggtggaggttgcagtgagccgagaacgcgccactgcactccagcctaaacaacagggcgagactctgtctcaaaaataaataaataaataaataaaataagataaactgacttgctaagtgtagtgtcaggatttgaacccctgcattctggctctgtttcctacacttacacccaccatgctgaggggtgctgccctggagtagggcaagcaaagactaggagctattaatagaagtttcatcctgttctctcccagctcccgcctctttccatctcatccttcagcagccttctttgctatgcctctctctggcttcatggtattaggggtgacttggaaagaagcagggaccagaggaataatattcactgagtttgtgtaaagaaaaaagctttccttgcctctagcaccttgcagctcttttattccaccgcctagatgcaacagcagaaatcatctttgcaattcaaggcctaatattctgaatatataaggagctcctgttatgggttgaattgcttcccctccacaccagaaaaacataggttgaagtcctaacccccagtactcagaatgtgaccttatttggaaatagggctgttgcagatataattagttaagttgcagtcatactgaagtaggttgggccccaaatcactatgactggcatccttataagaacgtggccctaggccgggcgcggtggctcacgcctataatcccagcactttgggaggctgaggtgggtgcatcacctgaggtcaggagtttgagaccagcctggccaatatgatgaaaccccatctctactaaaaatacaaaaattagccaggcgtggtggcgcgtgcctgtagacccagctacttgggaggctgaggcaggagaatcgctagaacccatcaggcagaggctgcagtgagccgagactgtgccactgcactccggcctgggtgacagagtgagactccatctcaaaaaaaagaagaaggtggccctgtgacgacagagagacacaggaataatgccatgtaaagacaaaggaagagagtggagctaggcagctgcaagccaaggaccgccaaagattgccagaaagccactgctgctgggaagagccaggtaggagtcctctatgggtttatggccctgatgacaccttgatcttggacttctggactctggactgtaagacaatacatttgtcgttctgacccacccagtctgtagtactttgttacag[137 bp omitted]accatgaaaccccgtctccactaaaatacaaaaaattagctgggcatggtggagtgcacctgtagtcccagctacttgggaggctgaagcaagagaattgcttgaacctgggaggcggaggttgcagtgagctgagattgcaccactgcactccagcctgggggacagggtgagactcgtctcaaaaataataataataataataataataataataattaatagaggacaggaaaagaagcacaaatgacccctataaaaatgacactaaccagtcacagtggcttacgcctgtaatcccagcactttgggaggctgaggcacgaggatcgcttgagcccaggagttccagaccagcctaggcaacaaagggagaccttgtctctataaaataaaaaaaggttagccaggcgtggtaggacatgcccatcttcccagctactcaggaggttaaggaaggaggatctcttgagcccaagagttcaagactgcaatgcgctatgattgtgccactgcactccagcatgggtgacagagtgagactatgctctaaaaaaaattagtcaataagagagaccccagagatctgtttcgtcccttctaacaggtgaggatgcagcaagaaaatgccttccatgaaccagagagcaggatcttgccagacactaaatctactggtgccttgacctaggatttcccagcctccagcactgtgagaaataaatgtctattgtttataggtattcagtttgacagatggtcttatttatatgtctggactctcaaccgtgatgtttggggtgctgggagcctctctcctcaagatttctcaccctgcaagaggtaagcctgggctccttcatccagtgtcaaagggttttcagcagcaagaaagtgagaacagcagtgacaagttctttttgtttaaatttttaaaactaattattaattttatttatttatttatttatttatttatttatttatttatttattttgagataggatctctctctgtcacccaggctagagtgtagaggtgagatgtcggctcactgcaacctccatcccctgggctcaagcaattctcccacctcagcctcccgaatagctgcgaatacaggtgcacaccaccatgcctggctatttttttgtattttcagtagagacagggacttgctatgttgcccagactgatcttgacctcctgagctcaagcaattcacccaccttggcctcccaaagtgctgggattacaggggtgagccactgcacccggcctaattattaattattattattattatcattattattttgagactcagtcttgctctgtggcccaggctggagtgcagtggtgtgatctcggctcactgcaacctccacttcctgggttcaagcgattctcctgcctcagcctcctgagtagctgtgattataggcacccgccatcatgaccagataatttttgtatttgtagtacaggtgaggtttcaccatgttggccaggctggtctcgaactcctgaccttaaataatccactcacctcggcctcccaaaatgttgggattataggcgtgagccactgcacccggcctaattattcttttttggaaacggggtctcactgtgttgcctacactggtcttgatctcctgggctcaagtgatccccctaccgtgccgcctcccagagcactgggattacagaggtgagccattgcgccctgacaaagctgcaagttcttgaggccaggagctcaaggcccaggctcagaactcatgggacatcaatatgtctcattctattggccaaaccaagttacaagaccagctcagatttgaaaggaggaggatcgacgctatctcttgatggaaggagctgcacagaactcgtggccacttgtattcgaccacacaccttttcacctctcaggttggcaaaaataaaacagtttgataatgcatggagttgatgaggctgtgggaaaacagatactccccattgtttctcctgggggtgtaaactggtacagccctataagaggtaattttgcaattgctctcaaaatcacaagtgtggcaaaaccttcgtcattttccaaaaccactcaccacgtccaggaacttggtgcatgcgtgaaatgatatggtcacagggctcttcattgcagcatagtttgtaacgtcagatgggaaaatactaatgctacaagaggtgcacttatccagcggaaaaagaaagaagaaactcttcatgcaattcaggttacattatggccaagttcaaaaatctaggggcagaacagtgcagggaataccccactgtgcattaaaggagagaggcctgccctggccaatatgacaaaaccctgtctctactgaaaatacaagaattagccaggcatggtggtgggtgcctgtaatccctgctactcgggaggctgaggcaggagaaacgcttgaacctgggaggcggaggttgcagtgagctgagatcacgccactgcactccagcctgggcaacagagcgagagtctgtctcaaaataataataataataataataataataataataataatgaaaagaaaaagaaaagaaaagaaaaaggagaagggcatgtgtctatatttgcttgtagagtatatgcattaaataacttgtctgggctgggtgtgctggctcatgcctgtaatcctaacactttgggaggccaaggtgggaggattgcttgagcccatgagtttgagaccagcttaggcaacacaggaagactctgtccctacaaaaaaaaaaaaaatagctgggtgtagtggtgcgtgcttgtagtcccagctactcaggaggctgaggtgggaggattgcttgagcatgggaagttgaggctgcagtgaactgagattgtgccactgcactccagcctgggtgacagagctaaactctgtctcaaaataaaaaataaaatacaaaacaacttgtctgatgcccccctgccaccacatttcaagtgaagtgcagggaaatgtcccttccctgcatgcctgctcttcattcttcagtccacaagcctcgtgtttgtgcagctcctggcctgtcacccagcccgagttatcggtgacgataacatctagagagactggcttcctctagtcatgaagtgtcaggcgctgctccctcctccccaaactccagacttggctgagggactctctgtcccatcttctcacctctcctgcaccaaagggttcttggtttacctgggaaggatgtgagccaagtccccagacttctccctgccctagcaccccattgagaaaagccatctcccatccccaggctgctatctttcctccttagggttggcaccttccagagtcacctccttgattgtacacactgattgaggggccccacctgggattctgggaagcctggcaggcctgtgggtgaccttgaactcgtcctttctctcgcttgagatctctcctctgagccaagaggggaggtcaacctcaacttgtccccttagcagccttatttatattgctaaataacgatgatgatgatgatgacaacgacaatgacacagcagttactgcccactgttctaagtgctctacataaatcaactcaatcctcacagcagcccttcgatggaggtcctcctagttgccctgttttacaaatgaggaaactgaggcccagtaggtaaaatgtcttgcccaaggccacttaacttggaagtggcagaactggaatttgaactcgggttgtctggttctaaagcgttcatcacccctctggacgggtgtgtggttttcttaaagctcactactacaaatacctccaatcctaacagagccaccatta[132 bp omitted]actaaaaaaatacaaaaaattagctgggcatggtggcgggcacctgtagtcctagctacttgggaggctgaggcaggagaatcacttgaacctgggaggtggaggttgcagtgaactgagatcctgccactgcactccaccgtgggcatcagagtgagaatccatctcaaaaaaaaaaaggagggcacttacagcaatccaggccctgggctacacccatttagcagataaacacactgaggcctgaaataggggaagggacatccccagagttacacctcataggaggagcaggtggggtgtcaaagcccatgaagggtggacttgccaggcaccaggctggaaggcccctcatggggtggttgaaattgatcttattcccactgaacaagtgtgaaaatcaaggtggcccagggaggagcaggaggagaatgacacgggtctcatccagagagggcagatcaatttcccttttggtgcagccctgtgctcaagccagagacatttgggttcaaatcctggttgtgctgattttcttattatgtgcccctggacaaggccttgactgctgtgagccctggttcccttttttgtaaaagagggaaccccagggctgatttcagttgtactggttgttaaaatattgaggtatgtccagatttggttgataaaattcccctgcctggaggccttgagtgccctgatggcatctctgggtcctcccagacatcttcatattctagaaagatgagggaaagaccgggtccctggaggccaacaggctgctactctagcaagtgggcaggattgttactaccaataccctggcctgtattgacaggtggtcaaatattttgagtatcctccgtgggtggggttaatgataatggctggtaggactactgtaaggatttagtgagctaatgtgtgtaatgagtgatgaggcaacccattattattttatattattattattatttcttttttagaggagagtctcactgtcaccaaagctggagtgcagtggtgacatcatagctcactgcaaccttgaattcctgggctcaggcgattctcccacctcagcctccctagtagctgggactgtaggtgtgcaccaccacgcctggctaatttttatttttatttttattttttattttgagacacagtcccactctgtcgcccaggctggagtgcagtggtgtaatcttggctcactgcaacctctgcctcccaggttaaagagatccttgtgcctcagcctcctgagtagctgggattataggcatgtgccaccacaccaggctaactttttttttttttttgagacggagtcttgctctgtcactgggctggagtgcagtggtgtgatcccggctcactgaaacctccgcctcccgggttctagcaattctattctcctgcctcagcctcccgagtagctgggactacaggcatgcaccaccacgcccagctaattttttgtatttttagtagagacagggtttcaccgtgttggccaggatggtcttgatctcttgaccttgtgatctgcctgcctcggcttcccaatgtgctgggattacagtcgtgagccaccgcgccaggccctaattggcttttgccatccagtgttgggcctggccttctcccgcaagggtgcaaaacaagttggtaaagatcagagaagctggatgggtaagcctgaactgtgaagttagatttatcggcaaaatgatggggctcttcagtaacctcaggaaatgccttggatatagcacagagttcagctttagttccagagacataagaaatctgaggacctcagtgtcgttagacagcctggtcttaaggggataagtttttataggttgaggttgtgaagcagaaaggaaaggggtgttagtggggaaagacatcagaaaagaaagaaagagaagggttaagaaccagtagataaggcctgagagagaaagatttggggcttcaaatgcctttttttttggagacagagtctcgctctgttgcccaggctggagtgcagtggtgtgatgtcggctcactgcaacctccgcctcccaggttcaagtgattctcctgcctcagcctcccgagtagctgggattacaggcgtgcgtgccaccacgcccggctaatttttttttttttttttttttttttagtagagacagggtctcaccatgttggccaggctggtctcgaactcctggcctcaagtgatctgcccatcttggcctcccgaagtgctaagattccaggtatgagccacggcgactggcccacctgtctaatttttaaatttttttaagacgctgggtctcactatgttgttcaggctggtctttaactcctaggctcaagcgatcctcccaccttggcctcacaaagtgctgggattacaggtacgagcccctgcacctggccacaacctattaatagtaataataataataacaacatgtccccctgtccttctctggcctcactgagtagtcccaggctttccccacatgcctctcaggacttagtttccccatctcgatgctctctcagtcccctctcttgctgggtgtcccagtggccaggatggtgggtggcaccgctatcttcccggcctatttgctctccctcttccggggctgctaccctggccaaggcccttgaataaaaggcaagggcacctgtgtcctgcttccttctctcctgcctggatcatgctctggctctctctgccctgttgctcctgggagcactggctgccccagcaggtaagcgcgtcatggtccatcagaaagggagagggtcggctcaaggtcacatgtggtgttgggagtctggcttcagagtctgggccccaggtccttccaactgggctcattgtctagcaggcagaagaacagggcagctgagaacctagttctggaaccaggctgcctgggttcaaatcctgactctgtcacttcttagccgtgtgactccagacaaaccacataacctctctgtgcctcattttttccatgtgtgaagtggtgacaatgcccctgcctcagacagttgttgagacattggttgaatccacacgtttgaggagctcagaacagtgccagcctggcagtggctctgtttgagggtgagctctgctggattatccaggagcagttactgttactcttttacctcacctgcctgtctcccctttggctctaattctgccacctttgcctgagttgggaattaagtggtttggatcctagccaggacctcactgtgcgatcttgaattgaaaccctaaacccagcagctcccacttagagattctgtgattctcatctccaaacctttgtctgcgttgtttcatcgacttggaatgccattcgcactcctcacaacaaagaaggttgctgatctcccaatggccctcccacctcagcccttagtcctattctttttttttttttttttttttgagacaggatctcactctgttgcccaggctggagtgcagtcgtgcaatcttagctcactgcagcctgaacttttgggctcaagtcatcctcagcttcctaaatagctgggattacaggcatgagccaccatgcctgattagtcctattcttgaatcgtgtgtgtgtgtgtgtgtgtgtgtgtgtgtgtgtgttctttgtccttctcaaactgcagagtctgatcactgttttcttccttgcaggaagctctaagacatgtccagcctgctctttgctgtgaacctgcattgaaataacttgtccttctgcccaggacttctgcttgtttagccagatgcagctgggtgggggaccgggctggggactggacaggggctgggtggagagaatggacaaaggcagtgggtggaaggggggcatggatgagccatcctgggactggagattgccagccctgcctcatagctcagcctggtgctactggggtaaagggcagagggcagctgaacagcaaaagaggccctggattggccagggggatggctatagagtgggcagaggtcctggagggcttggaaagcaggggccctaatctcccttcctcaaactctatccctagaaaatgggactctcattgagaaggggtcatgtgtggcccctggagaatgctaagaaggtgtctacgccctgacctacagcccccatgcaagcctctgggtcagcacagcctcttgtgaaaacaactgcagccaccttccccagtaaggtttgttgggaggacctcaggctcacacaccagggtagggtgtcatggggacccagcctcaatttcctgcctcacagctttttgtctggctgattggggcaagaaggagactctcagttttctcatctggaaaatgggtgtgatgtaggttttaaagggtgttcatcccctaggctggcacgtggtagacactccttttgttgccatgtttatttgaatactgggaggctaaagagaactccaagctcttttctgtttctctgtctctctctctctctctctctctttttgagacagagtctcactctgttgcccaggctggagtacaatggcgcaatcttggcctactgcaacctccacctcctggttcaaacgattctcgtggctcagcctcacgagtagctgggattacagatgtacacaaccacgtccggctaatttttgtatttttagtagagtcagggtttcgccatgctggccagtctggtctcaaactcttgaccttcagtgacctgcccgcctgggcctctcaaagtgctgggattacaggcatgaatctctgtgccccgcctctctttttgtctttaatagaggggctccccttgaaggctagtcaaacagaacaagaaacctcacaagtggtgataggcccaggtctaggggagcccagccaggagcccaggatgcaaaaatgtttattctttattttttatttttattttttttgacagagtctcactctgtcacccaggctggagtgcagtggtgcgatcttggctcgctacaacctctgcctcctgggttcaagcaattctcctccctcagccacctgagtagctgggattacaagcacatgctaccacaccaggctgattttttttgtatttttagcagatatggggtttccccacgttgaccaggctggtctccaactcctggcctcaagcaatacacccactttggcctcccaaagttctgggattacaagtgtgagccctcatgcacagccccagggtgcaaaatttaaggagatgctcacgctgaggggatagccctctacttgcacaaccctgaaaagtcgtgcctccttaaattttgggcccctggtttcaccctagatctggccctgggtggtgacaaagatcacttttcgttgcttggttatttcttctaagaaggaatttgtacttggcagatgtagcaatggggagaggtagccatcctttcaaacaagtgcgatttccctcctcctaatttgtgtctaattgccctcctaaattgtgtctctcagcaaaataaaacccccaggttcaagttacgaggtgggcatgctattcagtatataaaatgtcaggtatgattataactgcattaattttttttttagacagtcttgctctgtcgcccaggctggagtgcagtggtacaatcttggctcactgcaaccttcacctcctgggcttgagcaatcctcacacctcagcctcctgagtaccatggctacagacatgtgccaccatgactggctaattttttttgcattttgtagagatggagtttcgccatgttgcccaggctggtctggaactcctgggctcaagtcttccacctgcctcggcctcccaaagtgctgggattataggcataagccattgtgcccagcctcggtctcaaacactccttgcagcccctgaaaacttattctggggccaggcgcagaatcactttggagggaaatgatctggattgtgggagtagaggcagtgagagagggagggcaggagaacagaggcctagtgaggaaggatggctgtaggggtgttcctcagcccccaccccgccctgactttgtccactcccaccagaggcagggcccaaggccaagcccaacactgtgaaatgtcactactgttccaggaataagtcggctccatgaactgcactgggaaacagactgcatgtgtcaccctccacgggacctggagtagaggtaagggccccttcacaggaggtgatttttgtggcaggtttcttcccacctgcacaaataaggcttgagcttcatttgcacgtgcgtcctggttatgtattgccatttaacaaatcacccacaggccaggagcagtggctcacacctgtaatcccagtactttggggggctaaggtgggaggattacttgagcccaggagttcaagaccaacctgggctacatagcaagttcccatctcgaaaacaaaaacaaaaacaaaaaaaccccaaatcactcacaaggtgggtggctaaaaatgacaatcatttaatgatctcttccagtttctttggtttgggaattcaggaagagctcctctggagagttctgagtctctcgtatgttgtagtcagagggtgttaagagctggaactgctggggcaggaacaaccaggggctttctgagcatctcttgcatatatgtaagcacaggcctttctatgtggcctctccacatcggttagattgagcttcctcccatcatggctacctcaaggctctttacatggtggctaacgatttcattcagcaaacaaagttacagctgcttggtctttatgtctcagccttggaagtcacataatgtaacttctattctgctttattgatcaaaatggtcacaaaagttccatctggtttcaagatgaaagaggcatggaccccacctgttgatgtgtcatagatttgcaaaggtatttttaaatcaccagtatgatttgcaaacagttggaggagaggccttttcagcaaaagatttataatataaccacagtagccagaggatagactaattatgaagccaatcaaaggatcgagagcagtagcctgggcttctgcttttggcagtatggtggactcaatcctctaaaaggtcttctgctccaaacagtggcacactgggaaggtggaggactgagacagtgaaatagaggaagtggcccatcatggttgggaggagcagtttatcactgacattgcttagaattgctggtactacctggtgataataaaaagcaaactgatttttagttggttttatgatttaaaaaaattctctataggctgggcacggtggttcatgcctgtgatcccagcactttgggaaactgaggcgggtggatcacttgagcacaggagttcgagaccagcctggccaacatggtgaaaccccatctctgttaaaaatacaaaaattacctgagtatggtggcacacacctgtaatctcagctacttgggaggctcaggtaggagtgagccgagattgtgccactgcactccagcctgggtgacagagtgagactctgtctcaaaaaaaaaaaattctctatagacactaagccccttgtagcctgttcccaggctggactgctcccactcccttcccctgcttggtatgccactgtttacagataaacaagatcctgtacagaaatatttttccacactttttggggttgcagaaagttaagaaaatgtccacgtgtccctaagcaaaacaaaaatgtgaacagaaatcataatgggagcagtgagaaaacatggaaggcatggtggcctgggagcaaatgctgataataacctgctttaggtaaacaggtcttgggctggcagcatgcttctggaatttagattcccacataagcaagggacctcggacagaagccaaaatgatccctggtcagtagcacctcctggcactcagtagaatcaaaagcaattccttcccagggaaaagctcccaggattcccacagatgaatatcaaccaaatatgagctcacaatcatagttcatgaaacgcacaaggaaacaagccaccatgagtgatagcagaaataacaaatcacagatacagacctgtgaggagctcagctattgtaattatcagctgtagaacatagcgtaccggcacgtgatatgtctgaaggaataaacttagaatcacaaatgtgagcaggcaacaagaggttgtaaaaactgaccaggtagatttgaaactgaatcatatagaactactaagatggcaactttcagatagcgaaagatagacatcaagttggaaggcttggactctgagcctcttgttgcaatctcatctcatttccacagggggtccccaaattctgaagggctgtgctacaccagaggtctgcaacttacatgagaatgccaccctgggtccagaagactctggatttcatctcaccgctaagcctgaatgcaactgccttactcctacacatccaggtgctttgacccctgccttcctaaaaacccaacctttcttacctccctggatcccctatgctcttttcaaacctatgtgttcccagggtgtccacatttcctacgataatgctcccaatgagtacagttacccatacacacacacacaccacctgacacactcagaagcagaacatctattggcacatatccacaaacatccacatttacatcctagcacccaaaacaaatatgcagaggcacacaaatttctaaacatgaacatactctgaacatattatgtgagtgaggttaaagatccacgttctctttaaatggatctgagcctgggcagcatggcaaaacaccatctcaacaaaacaacaacaacaacaaaacaaagccaggcatggtggcatgcacctgtggtcccacctacttggaaggctgaggtgggaggatggcttgagcccgggaggcggaggtcgcagtgagctgagattgtgtcactatactccagcctgggtgatagggcaagaccccttctcaaaaaaaaaaaaaggaagaaaagaaaagataaatctgatggtgttttccctcttttcttcacttccttgcttgtgaaagaagacagatttgccaatagtcttcttttggcttaacaaagaacagtcacaagaagttttgtcttccgcaaaagtgatatgctaattgaaatagtatttactggggccacagtttattaagcaattcaaccaactgaacagagggatagacgttttagaggtgagaaaggcaattttctctggatacagctgcattccctcagctccagagatgtagaggaaactttgtcagaaactacaccagaaaggaccattctctctctctgtgtgtgtgtgtgtgtgtgtgtgtgtgtgtgtgtgtgtgtgtgtgtgtatgtgtgtttagagacagagtcgccgtctattacccaggctgaagtgcagtggcacgatcatggttcaatgcagccttgactttccaagctcatgcaatcttcccacctcagcctcctgagcagctagcaccacaggcacacactgctacacccagctgatttttcaattttttttttagaggtgaggtcctccctacgttgccaaagctgaagaaccattctgtgatgcaaaagagagtgtgtttactggccggg[138 bp omitted]gtggctggcacctgtagtcccagctactcaggaggctgaggcaggagaacggtgtgaacccgggaggtggagcttgcagtgagccgagattgcgccaccgcactccagcctgggtgacagagagagactctgtctcagaaaaaaaaaaaggctgataggagagtgtagttactgaatttgcaggcaaagccgaaacattctcaccttagcttcttcaaatctccagctgccaggagttttccttttttaaactaagcaatggatttttttttttttttttttttttttgtgagacagagtctctctctgtcggccaggctggagtgcaatggtgcgatcttggctcactgcaacctccacctcctgggttcaagcgattttccctgcctcagcttcccaggtagctgggattgcaggtacccaccaccaagcctggtgaatttttgtatttttagtagagatggggttttgccatgttggccaggctggtctcgaactcctgacctcaggtgatccacctgcctaggccccccaaagtgctgggattacaggtgtgagtcactgtgaccagccctgagcagcggatttaattaattatcacaatgaagaaaaaaggctgacttgggagctcgaaatttacaagatggaaagaaaaagggcaaaataggaagactaacaacagaaatgtgggacgcggaatttttgcacacatgatccctgtggacacagacacagaacatatctatgcatggacacacaggctttcatatatatgacatgggaaagagacaggcataaacacccacaaacatacaaaagcacaaaatatacacaggcaagctgaaatacattaccaacatccatgaacgttcacatctgtataccaacatatatatatatacaagcacccccacaccttgatggaaacacagacacacccagccacagaaacacacacatacccataaaaccagccttatacacatacacataaacacacgcctttgtttatacagacacgcaggtaaacacctactcacacagtgtcctgcagagctacaaaaacacacatccctgacctcctgcagacagtttcagaaacacacagacaattcaacacaggaaggcacagccagatgtgcacacagacttaacaggcctgcaaacttgcacacacaaatggcattcttgcagaagtgcgcacaaaaggcacttttgcgcactcatgggcacatactgatgtgcctggaaactcagctccatgcacgtgcatgcacactggttgtcttccatccagttcatcttcctctgtccccaggtcctcatgcaactgtgacccacaccaaagctgagaccaccgactgcttcacctgctgagacctccacagctgtggcccccttccatgcccagaggataatcactactgccttcagatggcaggcatcacaggtgagtgcccatggggacagaaatagggcttggggtacagcaagacctatcctcactctcccactttgctgcctagcttcagccattgtagccttttcctggacatgcagggcagaggctagggtgcagtggagggtgtgagtttgaaatctgctgccatagttgtttaagttactgctgaataacaaactggccagaacttagtggcttaaccagtcataaaaagacaaatactgtatgatttcactgagttatctagagtagtcaaaatcattgaaacagaagatagaatggtggttgccagaggttgggggacgggggaatgggagttgttcaatgggtacagagtttcagttgtgcaaaatgagttctagagagctgttacactcaacaatgtgaatatagttaacattactgaattgtgcacttaaaaattgttaagaaggccagccgggcgcagtggttcatgcctttaatcccagcactttgggaggccaaggccagcggatcatctgaggtcaggagttcaaggccatgctttgaaccttgtctctactaaaaatacaaaaattagccgggcttggtggtatgcgcctgtagtcccagctacttgggaggctgaggcaggagaattgcttgaacccgggaggcagaggttgcggtgagccaagatcacaccacttcactccagcctgggtgacagagtgagactccgtctcaaaaaaaaaaaattgttaagaaagccacacatgatggtttatgcctgtaatcccagcacttagggaggccaaggcaggagaatcacttgaggccagaagttcaagaccagcctgggcaacatagtgagactccccccatctctatttttttaaaaaaaacattaagagggtatattttatacagtgtgattttcaaaaaaaaaatcacaattgaaaaaaagcttcttggattagacaagtatttgttatttctcacaattctgcagctgactgggctcagctgggcagttcttctgctctaagtggtaaaggctgaggtcacttatgtgattgcattcagctgggagcttgactgcacctggaatgtttaagacagctggggagagcctcgctcctctgagctctcactagtcagtttcctagcttgagcttccttatagtacggtggccggcttctgagaaggaagaagtgggaacaaccaggccttctaagggatagacccagaactgtcacagtgtcacttctgccacagtctattggtcagagcaaatcccaaggcaggctcagatttaaggggtgacgtaacagattccacctcttgatgagagagtggcaagattatgttgcacaagagcatgcaggatgggagatacagttgtggccatcttggtatctactacaacactctgggcaggcagccccacttaaggctcctgtcactctctccccatagaaggaaaagtggactcttctgtaaacgggaagaggagttgaacttgaaaccggctctttgctatctttttacagcataaagagacatagtaaagatagtgttccaggctccagttctggacatttctgggatcttagagaagtttcttactaagtccatgaggtgctcatagacagggtggggagacctcacagatacagagccaccctattaattgaaaccctaaggagagaaggcaggggatcatggaaggctttctgaactatgtgatttttaactgttgttgttgttttgagacaaggtctcactctgtcacccagggtggagtgcagtggcacaaccttggatcactgcagccttgacctcctgggctcaagcgaccctcccaagtaggtgggactgcatcactatgcctggctaattttattttattttttgtagaggcggggggtcccactatattggccaggctggtcttgaactcctgggctcaagtgatcctcctgtcccaaagtgctgggattacaggcatgaacaattgccccaagcctgaacttaatgtgtcttaatgaacaatgaccagctttggatgtattatggggagatctcaggcagagtgaatgccatcagggaaatactcagagagatttggggagttcggttgggtggtgggttgtgattgcctttcctcactagcctggcctccatctctctccaggctttggcgaaggtaaccctgtctcctggagaaacggtttctgcgtgacctccaaggactgcaaatttggcaactccatctatgccctgacctatggtgttggctttggcttctgcgtcaacaccacctgttgccaaggcaactaccaggagcccacccctctcggtatgctgtcaccagaaagcagtcagatgggtggccaaggaggtggtgggtgactctggaggcagagttgaggaaggaatgcaggaaggaacatcactcaaccccaaccaggctgccctcaggcaccctgatcccagcttgggaggaaatcccaccaaggtcatgacaatattaagttcgtgacaatgtggtagagcctaggagtgcactcggggccccgggaggtcctgagattccttctgactgaccttcatcctcttctacacagcagctcatctggcctcacacaccctgagtgagatattgtgtcctacatgtcctgggagctacttggagccctgcaattcctccttctacatgcagtgtcccagtggggaatctgagtgtgtccagctggacctaacgtctgaagaaggtaatggggacagcacatgtgtgtgtgtgtgtgtgtgtgtgaagaaggtaatggggacagcatgtgtgtgtgtgtgcacatgtgtgtgtgcacgagtgagccttagcacgttagatttggatactggtgtgcttgagtttggagtctcccctccaccctttactctgtgtagctcaaggcaagtgactttatctctttgagcctctgttttctcttctggtaattggggatggtagacacacaccttgaagggcgttgtgaggacaaagtgaactcatgagggaggtgacagagtaaagggcataagaacaggactctagggccaggctgcctgggttcaaatgctgaatccaccacctgagctgggtgaccttgaccaggtgactttgcctctctgtgcctcaatttctccatctgtaaaaggggataacttggtatgcaacaagttctttaaaaaacaggggagggccgga[138 bp omitted]gtggcaggtgcctgtagccccagctactcaggaggctgaggaaggagaatggcgtgaacccgggaggcggagcttgcagtgagccgagatggcgccactgcactccagcctgggcgacaaagcgagatcccgtctcagaaaaaaaaaataaataaaattaaaaaactgaaaaaaataaaagatctttggactcaaacagacctgggtttgtggtgtggattcacaatttatctgcagtgtagtcttggacaagtttcataacctcgtctcaaaaaaaaaaaaagaaaaaacaacaacaaaacgggaataacaacagtcgctaagtcctaagactgttgtgagaattgaataagataatccactaaactatatcagtgctttctgaaagaaatgtaatgtaagacacgtgtgtaatttaaaattttctgggccaggtgtggtagctcacacctgtaatcccagctctctaggaggccaggatcgcttgagcctggaagtttgagaccagcctgggcaacagaggcagaccctatctctacaaaaaattttcaaaataattagctgggcctggtgctacggcctgcagtcgcagctactcaggaggctggggtgggaggatcaccagagcccaggaggtcgaggctgcagtgagctgtgattgtgccactgcactccagcctgggtgacagagcgagactctgtctcatttttttaaaaaaagtttttaaaaaaggaaacaaacattgcacacgagtgaaaacacacctgtaacatacgtgtaaggtagaaagagtgacaacgagagagagacagccgtgaccagctcccagctcaaagaaaagaacattcctgatgagctttcacgaaggacatggactcgaggggctcgcgggccctgtgcgtgtgcaaggcgcgcgcgtgtgcgcttgggtgcgcgcgggggtggccttctgcctgcgcgcgcccccacgtcccctccttgcaccctgtctccgtctcggcaggcggccggaacgtgaacgtacgcggctgcggctcccgagacctgtgcagcgccctggactggacccacgggctctctgtgctcccaagacactggctgtcgagccactgcagcccccaccgccgcgccgtcctagagtcccactgccgctcgggcgccgcgcccggcctccgcctctccctcccggttctggtggtagtcctggcaaccgcgacgctgtgctaaggaatcccgcctggaccaccccgccgcccgggaggccccctccacctgcttgttcggcacgtcgctagatggtgccctggctcccctctgctggggcaatgcggagacctggaagcctctggtgagaaactcaggaagcagggatgagcttcctccctcagactagcgtttcccaaagccagaccttctgctccagactcagggcttactcaaggctaagtcctctttcctcacaccagggtcccaaaggccatgcctccatcagcctagggtgtgtcttccccgctcagactaaggccactcacctgctgctgagatcaggcgtctgctcaactaagttggggcggggcgctatacctcccccctcagattagcaccttccccaaggccaaacctcctccctcagaagagggctgttcttcttcctcaagttactaagcctccttcttcaaacgaggggatacccaatatccggctgctcccagacaccagggatgtgtctcttctcccacacattgacaagcaacttctcttttgttctccctgtttggggtctagcaaaatcctgggcagccaaggcggggcttgaggatccgatacaccctcttccaaggttttcagagcagcctcctccacccccaccatgggccaagacggggcagggggcatgggtggggtgaggagcccctcttctgtgtgggcccaatctcccagctgtaaccagatctgaatgaatcacatctcacaatgccaagtggtttgagtttcctttttctgaagttttagcctcaaagagggccctgatgtggtcctctctcctctgaggccaggggaggttaagttacttcaactggtgaacctggaggggacaaaccgacaacagtgtctggccagggtgggcataagaccaaatgctgcatctggaactgaactcagaggattgagcggagaagtgaaactgggttgctcaccacaggcagaatgccaggaaccatttgctttctgctgaaagtggctgagcgcagtggttcacgcctgtaatcccagtgcctgggggctatgacagtgggagggagggctacctaagaaatcactccaggccatgcaccagacagattaggcggcg[134 bp omitted]gaaacccgtctctactaaaaatacaaaaacttagccgggcatggtggcgagtgcctgtgttcccagtcactcaggaagctgaggcaggagaatcacttgaacctgggaggcggaggttgcagtgagctgagattgcgtcactgcactccagcctgggcaacaaagcgagactccgtctcaaaaacaaaaactgaaagtaacagaaagcccaaccgaaagaatagaaacaattcatttaacattcatctaacaaatctttatcagtcacaagctatgtattcttttgtaaatgagacactggcgatacagacaaaattctgtgctcttatggaagtggtattttagtggaggagacacataataaataaatatcacatatcgtacatcacatatcagtgagtactaggaaggaaacagtgcggggaaggagaatggggaacgctgccaaagagatatgatcttatacatggtgagtaagagcctcagtaaggtgacgtaagtaaagacctaattgaggaagtaaagacctacgtggggcaagggagaaggccatgcagttgtctgaggtgggggaggaggacattccaggcagagggaactggaaaggcaaaggctccaaggcagatgcagtaagaaacagttaatgtgggtcagacgcagtggttcatgcctgtaatcacagtgtgattttgggaggctgaggtaggaggattgcttgaggccaggagttcaagaccagcctgggcaatatagcaagatcccatctctacaaaacattgaaaagttagcctagcatggtggtggactacagg[137 bp omitted]ggaggc[133 bp omitted]aaaaaaaataaaagatctttagactcaaacagacctgggtttgtggtgtggattcacaatttatctgcagtgtagtcttggacaagtttcataacatctctgagccttgtgttcccatattgtaaggtgttattgtaaggtacattaagcacaaggcttggcccaccctaagctttcaaccaattgaaatagtcatgtcttcaggttgttaatcatgaggactgtgctattatttatccacattgtatagaggaagaaactgaggctgaaggaggctaagagactgctagtatgaagaacattgggactgaacacacatctgtctgactctagaagataaaatttcccccccttaaacattaagaaaatgtccaaatatacacaaaagtagagaaaatagtataatatctatgacagactgataccccaatctatgatgggaccaaaatgtgactgagcccagagcccatagcaggcgcccaggagatgtttgcagctggaagcagtcattaaatgacccttcagtatcaatctctcagtgtccaaaattatgcacattttgccaaattatctctctcttccttcccccttccctgcctcctcctttcctacaccttcccctcttcctccctcctcacctctctcttttgcttttttttttttgagatggagtctcttgctctgttgcccatgctggagtgcggtggcgtgatctcggctccctgcaacctccgccacccaggttccagcgattctcctgcctc[133 bp omitted]ttggcctcccaaagtgctgggattacaacgtgagccactgctcctggcctttcctttgcttttaccctccctcctttgctctttctctctccctccttcctttctcccttctttcctcctctctctctttctccctcctctccttcatacttctttcttcctttctcccttcttgccttcctatattccctccctcttcccttctttcctttttgtgctgagacatttaaagcaaatcccagatatcatatttcacccataaatacttccctgtgcatcagagcccatgctttcgactcttgtaggacggacacatcctttctgggagggaggatggaataaaataaagcatactgagagcttagcataacccacacccatccctgcctgtttgcagaaggcctagaatatcctaatccttcaggggagatctcccttcacccatggatctgtgacattcttctaaatccttcatagaaagctcatatcaaaagtgactagttcacctgtctctacaaaaaaatcaaaaattagcctgggtgtgggggcacacaccagtgttcccagctactcaggaggct[135 bp omitted]aagagacatagccacagagctcagcatagtggttcagaggatgtactcaggttccagtctgtctgggttcgaaagccaacactttgccagttactagttgtttttttgtttttgtttttgttttttacctttggaaacagagtctcactctgtcactcaggctggagtgaagtggcgcaaactcagctcactgcagcctctgcctcccaggttcaagtgattctcctccctcagcctccccaatagctgggattacaggcgtgccaccatgcccagctaatttttgtatatttagtagagatggagttttgccatgttgcccaggctggtctccaactcctgagctccggcaatctgcctgcctcggcctcccaaaatgctgggattaccaccattttgtgagccactgagcccagtcactagttcagttactagtggcctcaggtgagtaccttgacctcagctttcccatttgtgaaatgggacaatagtggttcctgctcacagagtggacacaaaggttgagagagtccacacatacacagaactcagaacagcgcctggaattcagagttcaacacaggtaaatggtggcccttactgtcattattggggagggggagtgccctttgggtcatgggtcccgtttctgtctgttacccaacatggcctcccgttgtgaaggttgcctaccccaaggtatgggtgtgaaggaacctgggggtggtgaggaaggaagcaacatctctgccagactggagtctcgggggatgggtcccggatatgacctgtcctggctgagtccagagtccatggcaggtggtcaggaaacatttgtggaaaacagtcatttaatggtcctggaatctgcaggggtaaaagggactttggggatggggtggggctaacctgggtgaagaatttgatgttattgtacattgctaattttccataggggcatacatgtaggcatattattcaagttttaaaattttactataaattatttaaaacaaacaaaaacaaataaagaataagtggagtctcttggcactcagttgaaagacaagaaacatcaaaacatttgaaatacatacccagtggccatagctgtccctggccacagctcctttcctctctcctcacctgagatcacctctatcctgaacatggtatttccaattttgccacctacaggcatgcttttgattttttttttttcagacaaggtctcactctgttgcccaggctggagggcaatggtgctatcaatagctcactgcagcctcaacctcctgggctcaagtgatcctcctgcctcagcctcctgagtagctgggaccacagtcatgtgccaccatgcccagctctttcttccttccttccttcttcctttcctttccttctcctttccctcccctcccctcctttcccctccgcttctctctcctttccttccttcctttctttctctctctctctccctccctccctcccttcttccttttttttttttttttgagatggaggctcactctgttgcccaggctggagtgcagtggcatgatctcaactctctgcaacctccgcctcccaggttcaagtgattctctcagcctc[203 bp omitted]gtctccctatgttgcccaggctgttctcaaactcctgagctcaagcaactttcctgcctcgaactcccaaggtgctgggattacaattatcagggtgagccactatgcccagccacctttaattttttaaggaaagttttctcttcttttctgcttggctctctcctcacctttctcttctctcccccacagactccttcataggggtgctcatagctcactgcagccttgatctcccgggctcaagtgattcttccacctcagcctcccacgtagctgggaccacaggcatgcaccctcatgctgagctgtatgtatatgttttgtagagatgggatctcactatgttgcccaggctggtctcgaactactaggctcaagcgatctgcccaccctggcatcccaaagtgctgggatgacaggcaagagccactgtgcctggccaactctctgcatcttgcttttctcaaccctccgagtcatttgattcaccctttctaatggctgtgtggtgtggtttccatggcctatggcatggatctaccaacatttattcagcagtcatcgtcctattgaggggaattgacgctgttttctcttttgtccctcccactatgagagatgcagcagtaaacatcctcctgacaagacagttatcatctgttatgtgtctctgtgtcctgaataatttctaatgaattttaaaagtttggggcaggtgcagtggctcacacctgtaattccagcactttgggaggctgaggctggtggatcacgaggtcaggagttcgaaaccagcctgaccaacatggtgaaaccctgtttctactaaaaatacaaaaattagccgggcgtggtgttgcatgcctgtaatcccagctactcaggaggctgaggcaggagaatcgcttgaatccaggaggcggaggttgcagtgaaccaagattgcaccactgcactccagcctgggcaacagagcaggactctgtctcagaaaaaaaaaaaagcttggatatcatatccctttcatgcatgttttaaaaaattcaaaaatgtgtaattaaatgaaattgaaagttacacttaaaaattagaagtaagaggccaggtgcggtgggtcacacctgtcatcccagcactttgggaggccaaggtgggaggaccatttgaagttgggggtttgagaccaacctggccaacatggtgaaaccctgtctttactgaaaaatagaaaaattagccaggtgtggtggcggtcacctgtaatcctagctactccggaggctgaggcagaatcgcttgaacctgggaggcataggttgcagtaagcttaaatcatgtcactacactccagcctgggtgacagagcgagactctgtctcaagaaaaaaaaaaagagagaagaagtaagaaacagtgaagtggccctcacctccccgggtgtgccccactccccatgtgccatttccatccagatggggccccctagacatcctttttcccctgcaggctccagggagtggtcaatgaaattccttcagtcatgaaaagttccatcagatagatctttaggagcaggggtgctcaactgaaggaaatgtgtgcgtttaattcattaataagtgttgtcagatttgcctcaagtgtttcatctggggccttcctgcatggagaacacctatttctctccatcaggccgaatccaacttcccagccatcccttctgcctcctcccaccctctctctctgaaccttccaaggtcacaacgtggggttctgaccagtgttgcgctgagccacgtggggcctgacacaaaaggcactatttacccatgcccctctgtcatggtttcatttttgttttgtgtttttgagacaaggcctggctctgttgcccaagctggagtgtactggcttgatctcagctaaatgcaacctccgcctcctggcctcaagccatcctcctaccacagcctccaaagtagctggggctatagacgcctgccaccaagctcagctaatttttgtagagaccgggttttgtcacgtttcgcaggctggtctcgaactcctgggctgaagcaatccgcccacctcggcctcccaaagtgctgagattacaggtgtgagcctctgcacctggccttcatgtaatttttttgtttttttgagacagagtctctttctgtcacccaggctggagtgcagtggcatgatcttggctcactgcaaccaccgcccctcgagttcaagcaattctcctgcctcagcctcccaagtagctggaactacaggcacatgccaccatgcccagctaatttttgtatttttagtagagacagggttttgccatgttggccaggctggtctcacactcctgatctcaggtcatctgcccgccttagcctcccaaagtgctgggattacaggtgtgagccaccgtgcctggcccttcatgttttttcagtggctaatttttttccagaacattaaagtagtcaaaataatattgaaaaattcttgagtgggtgtattaaaactcacgctatttcaagttaaaatattttaattacaacaatataaaatgtattataattttatttcagcttaagttaattaaaaattattgaacatcatcacttggttaagagaaattgtcaagcgtggagattctctcaattgaaaatgaaataagccaagatgtagattttgaaaacattattgatgagttatttttccatcaaagctggagtgtatatttagggcttggtgtggcattggtctttatttagaattttgatattttgttcatgaaaatatcagggctgggcacggtggctcacgccagtaagcccaacattttgtgagggcaaggagggtggatcacttgaggtcaggggtttgagaccagcctggacaacatggtgaaaccctgtctctactaaaaatacaaaaattagctgggcatggtggcaggcgcctgtaatttcagctactcaagtggctgaggcacgagaatcgcttgaacccgggaggcagaggttgcaatgaacccagatcacactccagtctgggcgacagaggaagactctgtctaaaaaaacaaaagaacaaaccatggattttttggcattaatttttattagttaaaatattgcattaaaaattgcattaaaatataatttatctcaatgactcaatttttcgcactcccttaaattttgcacccaaggccagttcctcattgtccttagttctgaccaaattgagtcactgaatgtagaagagtcccacctcactcctggcttgtttctggaaagcctgtgggttggctgggctcagctgtatggttcttctgccccccatgtggtgttggctggggttacacctgtgcctgcattcagctggagctcatctgtggctgaaatgtcctggatggcttcaagctcatctccatgtggctgcagtctctacatgaggtctctccagcacggtagcaggacctctttgcatagtagttctggagaaagaaggagaaaacaggagctgccacctgttaaggcctgggcttgggagtcccagagtgtcacttcttgtgacaaagaatgtcaccagactggcccaaatttaagggaaggggaaagagactctgcctcttgctagaaagagtggtacatgcccacagggaagggaaaattgccagtggcagtctatcccttccccaaaccccttccccaactgcccacctctatcctcttgcttgctttttctttgtttttcttatcattacttgacactatcttaattacttttgtttataagctccatgagagcaaggactgtttttgttttgttttttgttgttttttgagacagagtcttgctctatcaccccagctggattgcagtggcacaatctcgactcactgcaacctctgcctcctggattcaagcaattctcatggctcagcctcccgagcagctgggactataggtgcccaccaccacacctgactattcttttgtttatttatttatttatttatttatttatttatttatttatttcgttatttacttattttgtagttttagtagagatggggttttgccatgttggccaggctggtctcaaactcttgacctcaagtgatccacccacctcggcctcccaaagtgctgggattacagtcataagccaccatgtctggccctttttcttcttttttcttatcactacttgacactatcttaattacttttgtttattctctacatatttaaaaaatatataagctccacgagagcaagggccttctgtgtcttattcatcactgtatcagtacctaaaactgtgcctagcacctaaaaggcagccagtatttacatgaatgaatgaatgaatgaatgaatgaatgaatccctgaggactgacttcaggtttacccaggttgtggagagtggagagaaggtggaggccaccacatgtagatattcctaggaaagtgctttagaatttctaagagacacagagagaaagggcagggaggaaaggaggcttgggagtgggcagaagaaatcgttcagggactgtctttttcactgctgtgtctccagcctcgaccagccagggcctgactcacagtaggtgtctggaaagcatgtgttgaatgaatgaactttctccaaaaatccttcactgactccacccccacccccaggctgggtcaggcaacccccatggctcccacacctctctgggcagcttcaaccccattgtaaccactgtgggtcatcactgtctgaggacggaggtgtgttccctacaagactcagagtccatagggttggtgctgtctcagtcaccactgggtccccaacatcaaccaaggggttcttggaggtagtaagtatactttgcatcaacctcctctctgtggggcagagccgtcccatcactgctgtattctcaccccggagggacacagagtagacactcacaaatcaccttcattgattctaagagagattcgttttcctttttcttttcccacattttaacaattttttttaagagacagagtctcactgttgcccatgctgaagtgcagtgatgtgatcacagcccactgcagccttgacctccatggctcaagcaatcctcccacctcagcctcctgagtaacaaaccacaggcacacgccaccatgcctggctaattttaaaatttttttgtagagatggggtccccctatattgcccagggtggtctcgaactcctgggctcaagcaatcctcctgtcttggcctcccaaagtgttgggattacaggtatgagccactgggtctggctgcaattttaaaaataagacaattgactgggtgccgtggctcacatctgtaatcccactttgggaggtcgaggcaggcagatcaactgaggccaggagtttgagaccagcctgaccaacttggtgaaaccccatctctactaaaaatacaacaattagccaggcgtggtggtgcatgcctgtaatctcggctactcgggaggcggaggcaggagaattgcttgaacctcggaggcggaggctgcagggatctgagatcgcgccattgcgctccagcctgggtgacagagtgagactgggtcccaataaataaataaataaataaagacaacaatgaagtttgctgcatcacttgcctcttcctttcacaaaagatttctctgtagcatgcgacgctgtttgatagcattctacccatggcagaactttcaaaattgaaggcaatcctctcaatccctgcgactgccttatcaagtaagtttatgtcatatcctaaatcccctgttgtcaatttaacaatattcacagcatcttcaccaggcgtagattccatctcaagaaaccactttctttgctcatccataagaagcaactcctcgcctattcaagtttgatcatgagattgcagcaattcagtcacatcttcaggctctacttctaattttagttctcttgctatttctaccacatctgcagtaaatgcctccactgaagtcttttttttgttgttgtttgttttttgagatggagtcttgctctgtcactcaggatggagtacagtggcatgatctcagctcactgcaacatccgcctcccaggttcaagcagttcttctgcctcagcctgccaagtatctgcaattacaggtgcacatcgccgcgcccagctaatttttgtatttttagtagagacgagattttgtcattttggccaggctggtttcaaattcctgacctcaagtgatccacccgcctcagcctcccaaagcgctgggttacaggcatgagtcatcatgcccggcctttttgtttttttgagacagggtctggctctgttgcccaggctggagtacggtgttgtagtcattgctcactgtaaccttgaactcttggaatcaaacaattttccctcatcagcctcccaagtagccagaactacaggcaagtgtcaccacactcagctaactttaaacattttttgtagagatggggtctcacgatattgcccaagctggtctcaaactcttggcctcaagggatcctcccaactcggcctctcaaagtgctgggattacaggtgtgagtcaccatgcctggcccctatctcagctttggacacgccttcttcactgagcttaatcatttctagcttttgatttaaagtgagagacacgtgactcttccttttacttggatacttggaggccattttagagtcattaattggcctaatttcattatagttgtgtctcacagaagagggaggtgcaaggagaaggagagagacaggaaaatggccagtcagtggagcagtcagaacacatacaatgtttatcaattaagtttgttgttacctgtgggcacagtttatggtgccccgaaatgattacaatgctaacatcaaagatcaccataccagagataatgatgatgaaaaagtttgacatgttgtgagaatttccaaaatgtgacacagagacatgaaatgagcacgtgctgttggaaaaatggcaccaacgggcttgctggacacagggttgccacgaactttcaatttgtaaaaaccatagtatcaggccaggcggggtggctcatgcctgtaatcccagcactttgggaggccaaggcgggaagatcacttgaggccaggagttcaagaccagcctggccaagatagcaataccccatctctattaaaaataccaaaacaagccgggcatggtggcgcatgcctgtagtcccagctactcgggaggctgaggtaggagaagcccttgaacctgggaggtggaggttgcagcgagccaagatcataccacgcactccagcctgggcaacaagagcaaaactccgtctcaataaataaatgaataaataaataaataaaacaagagttgggcatggtggcgcgtgcttgtggtcccagctacttgggaggcaaaggtagtagagattgcttgagcccaggaggtggaggttgcagtgagcagagatcacgccactgcactccagcctgggtggcagaacaagaccctcttctccaccacatccccgcccccccgcaaaaaataccacatagtatctgtgaaggacaataaagctgcatgcaataaaatgaggtgtgcctgaaattgagtttattattgaacgaatgaaagttctctctcaactcaggttctttgcagaggctggtcccttagcctgggatgcaactccctaatgtgccatctggctcactcctactcatcctttggatctcaggtcaggtgccccctcctccaggaagccctccctgactcccaggctgagtcgggcttcctcctttgtgctcccacagccctctggggtcccccatcccagtgctgccccctctgtcatcattatcttgggatggatctgactccaccactggactctgagtcctgtgggggcagagcctggctgtcttgtccattgctgcgtttccagcatgcagataggcagggtgcaacccctctctctctggctggtgctctcaggagctgctaggggcatccctgggaacatgccagtctgcatcggtgcatgtgtgcaggtggcagtggctctctttcttggtccacaatcatcctgggctgcaataatctccattttctcgggcctggagcccctgaagcagtgcctgggtttgatgcatctctggagccctagctgctgcagcagaatgaatgaggttcctgaatggagtcagtgggtttcggggtttctgtatatgttgtcagtgtgtaactgtgtctcttaaagtctgcacatctgtgtcccggaatgtgtgtgtttgcgaggctttggtaagtgtgtgtttgtctgagtcttgctttccttcagtgactctgttgttttgtttcgtttagagacagaatcttgctcagtcacccaggctggagtgcagtagcatgatcacggctcactgcagccttgaactcctgggctcaagcaatcctcccacctcagcctcctgagtagctgggactacagatgtgcaccatcat[186 bp omitted]gcggtggcaggcgcctgtagtcccagctactcgggaggctgaggcaggagaatggcaggaacccgggaggcggagcttgcagtgagccgagattgcaccactgcactccagcgtgggagacagagcgagactccgtctcaaaaaaaaaaaaaaaaaaaagagatagggtcttgctatgttgcccaggctggtctcaacctcctgggctcaagcaaacctcctacctcggcctcccaaattgctgagattacaggcgtgagtgagccgccatgcccagccacgaagtaactctgtatttgaggctctttctgtgtctttcccttctctcttgggccaggggtgcgtgtccatgcattttgggaaggagtccttgctgtctgctggtctgtgtgctcggtgtccggggaagtctgagaaccatgttgttcactctcttcagctctgtgtgtttgtgtcagtcagtgagagcatgagtgagtcgtgtgtcttttgccctgcacctccctttcacctgtggcttaagaactctgtactatgcggccaacagcccactcttccccagctctcagggtggctctgagctagtctattccccttctgggcctctctctccttagttgttctcagaggctcctttccagaactggcctgcagatggtcaggaaaatcctctgagtagcgttattgtaaattccctacaagaggagaatggagaaggccctgtggagcctggcctgggcagagaggaagcccggaggggagacaggacagagacacttataaaggacaagaaggggccgggtgtagtggctacacctgtaatcttagcgctttgggaggcggcataacctgaggtcaggaggtttgggaggcgaggcaggcggataacctgaggtcaggagttcaagaccagcctaggcaacatggtgaaaccccacctctactaaaaaaaaaaaaaaaaaaaaaaaattagccaagcctggtggtgcatgctagtagtcccagctactcaggaggctgaagcaggagaatcacttgaacccaggaggcggaggttgcagtgagccaagattgtgtcactgcactccagcctgggtgacagagcaagacactgtttcaaaaaaagaaaaaaaagaaatcaatgactaaattattgggcttacaagatagcagatcagcctcccgagtagctgggactacatgcatgcaccacatctggctaatttttgtatttttagtagagatggagtttcaccacattgcccaggctgatctcaaactcctggcctcaagtgatgcactcgcctcggcctcccaaagtgctggcattacaggcgtgagccactgtgcccaccagcaatgaccgaatttgtatcatcaactttcacacttctctggggaactgacagtcccctgggtggagggtggagtggtagcagggccaagcccttggaaaccaatctgtgaatctgagactttgtccttggggggtgatggagaccatggaggattttgaacaggtcttggtgttagaaagatctctctggagtcttcaggggaactggagggcccagtgtgagtgggtggtgaccccatgagcagctggggcttggggtccctgctccacctccgggccccaccccctgacatcactgtcgcattattgcaccaggtctggctgaccaataagctgctgcttgctatgataatgggtcctagcaacggtgtctgaccttggctaagagggaaggagatcctatcagtggggagagtgtgaggggagagggagagcctgcagggcaggtgagtcccccagggctctctcgctgggcccctgtgcgtgggcggagcaggagcttatggtctaatccggaccccctcagcccaaattccaaccactgacttgtctgccccttgctgccaggacctgttccaggttcctactcttcccaccgcagaccatactagggagagggcacacccaggataggaggctcag[136 bp omitted]ctacaggcatgcgccacaacacctggctaatttttgtatttttagtggagatggagtttcaccatgttggccaggctggtctcgaactcctgacctcaagtgatccacccacctcggcctcccaaagtgctaggattacaggcgtgagccaccatgcccagccgggaacaatgtcttaaggacatatttctgtggggggtggagtggggtagcagaggatggggtgagtggtaggaggtgaagagacggggtgcagggggcaaggagacaatgcaggaggcagggacatgcagctgaagggagagtagctctctaggtgggtgaaggagcctggggacctgggttggggtcctggctatgcctctggatgaggagacctcatttgtcttgtctgagcctcagtccttctccctgtcaaatggggacagtgatcccagacatgagcagctctcccagggcaccctgaagacccttagtgagtaaatgtattttagagatgatgggccagaggagggtgagtgggaagagggaggaccagggaagctcctggtgaggaggagggatctgaggggggaccatcacgacaggagctctgggcggtgggaggggaactgaaccccgggaggcaagggctgccatggcaggggtggggtttcatggaaatgactcctggtgtccaggtggtccccatgtctggcttcccgaacccaagggcgtctgaacccaaagtcagcctagggctagctgaacggggtttgtgggcatcacagcagccctgcgaggtggggaggagtatcccccacggggcagctgaggctcagacagggcgaggacttgctcaaagtcacacagctaagaatattactaatgataagaataatgacgatgatggtgatgccaatgacacgaggcacctgccctgagccaggcgccgttttatgggctgctttatgtcataactcattcaagtcacagagatcctaggaggtggtttgccaggattgtaggtatcattctcagtgttcagatgaggagagtgaggagagagttaagtaacttgcctcacatcactcagtaagtatgtggtggagccaggatttgatcccaggcagtctggctccgggtctgggtcccctccaccctaccctccaatcccagccaccgcaggagtgcagctgtttcctctgaatgggcctgtaccaccctttcctatgcagccctggctatgtaatttgccctggctatataatttgcaaggcccagtacgaaatgaaaatatggggcccctggttcaaatattataaagaatttcaggccaggcatagtggctcatgcccttaatcccagcgctctgggaagctgaggcaggaggaccttgatctcggaagttcaagaccagctgggacaacatagtgagactcccatctctacaaaaaatttaaaaagtagctgggcatggtggcatgcgcctgtggtcccagctgttcaggaggctgaggtgggaggattgctagagccaaggagatcaaggctgcaatgagccatgatcgtagcactgtgctccagcctcgatgacagagagaccctgtctcaaacaaacaaacaaacaaacaaacaatttcagctagtgtcagcagagcattaaaccaagcactgggccattctaagcacagaaccctccagggcacacatacacccagaaaactgacctgtgcctaggttaccctggagactccaatagtgctccaagaggctgcttggtggtcatgcccattacccagagaggtgcttcattttgcccctggtcacacagcaagttagtggcagaaaagggatgtgaacctgggcctgccagaccccaaagccctctaacttgtgccaaaaatgtgtccccaattcttgaaggaaaaagagagctgtgggcttccagggcgactcccttcacatccgtggtatctgtctctccctgccccatgccaaggcccaggaggtgtgaatggctcccttctcctctgcaggcgctgaggatcacgcatcctgtgactctcccctgtcccccgccaccctctgaaccactggccaccatggctacttcaaagttgcccgtggtgcctggggaggaggaaaacaccatccttatggccaaggaaaggctggaggccctgcgcacagcctttgagtcgggtgacctcccccaggccgcctctcacctccaggagctgctggcctccacggaaagcatccgcctggaggtgggcgtcacgggcgagtcgggcgcgggcaagtcctccctcatcaatgccctgcgtggcctggaggccgaggaccctggcgcggctctcacgggcgtcatggagaccacgatgcaaccgtcgccctatccacacccacagttccctgacgtgaccctctgggacctgccaggagccggctctccaggctgcccggctgacaagtacctaaagcaggtagacttcagccgctatgacttcttcctgctggtctccccccgccgctgcggggccgtcgagacccgcctggccgctgagatcctgtgccagggcaagaagttctactttgtgcgcaccaaggtggacgaggacctggcggccacgcgcacccagcggccgtcgggcttcagagaggccgctgtcctgcaggagatccgagaccactgtgccgagcggctgcgggaggccggcgtggctgaccctcgcatcttcctggtgtccaacctctcgccggcccgctacgactttcccacgctggtgtccacctgggagcacgacctgccctcccaccggcgccacgctggcctgctgtcgctccccgacatctcgctggaggccttgcagaagaagaaggccatgcttcaagagcaagtcctcaagaccgccctggtgttgggcgtcatccaggccctgccggtcccagggctggcggccgcctacgatgatgcgttgctcatccactcactgcgtggctaccaccgcagctttggtctggacgacgactcgctggccaagctggccgagcaggtgggcaaacaggcaggtgacctgcgctcggtcatccgctccccactggccaacgaggtctcgcctgagactgtcctgcggctctattcccagtcgtccgacggcgccatgcgggtggcccgcgcctttgagaggggcatccctgtgtttgggacgctggtggctggcggcatcagctttggcgctgtctacaccatgctccagggctgcctcaacgagatggctgaggacgcccagcgtgtccgcatcaaggccctggaggatgacgagccgcagccggaggtcagcttggaagtggccagtgacaatggcgtggaaaaggggggctccggggagggaggtggggaggaagccccactctcaacctgcaggaagctcggcctccttcttaagtacattctggacagctggaagaaacacgactcagaagagaaataaagagtgcagccccgcccccctgcctcacccacaaactaagtcttaacaaaatccaaattaccaacaaaaaaggccgatgtggtgaatgtgagggctgcagttgcctggggggtgggtgtggagggagcctgtgtccctggcaggcaggggagccggcgtcctgggcagggcaaaggagggggcactggggaggggaggagggaggcaggtgggcccagggccaacaggggtgtagtgaaaggggacaggagtgccctggagagggaggttggagacatggatggtgggcccagggttccctggtggtgtctttctccctggtccccaagtggccaggaggaatttgtggggcacaggacagcagggccaagacaggagattgcatcctgctaaggtgctttctattttattttattttattattattattttttgagatggaatcttgctctgtcacccaggctggagtgcagtggcccgatctcggctcattgcagcttctgcctcccaggttcaagcaattctcctgcctcagcctcctaagtagctgggattataggtgagcaccaccaagcccagctaatttttttttttttttcgagactcagagcccaggctagagtgctgtggcacaatcttggctcattgcaacctccacctcccgagttcaagcaattctcctgcctcagcctcccaagtagctgggattacaggcacacgccaacacgtccagctaatttttgtatttttggtagagagggggtttcaccatgttggccaggctggtcttgaactcctgaccttggcctctcaaagtgctgggattacaggcgtgagccactgcacctggcccctgctaaggtactttagtttcaatctcatgtccgtgtctgagaacccagtgtaccaaagacagccccaggggcctgggatgagcacagtggtgtccagcaatggctaaacaggttggggagagtgggcatccgtgcctgcctgctgcctgggagccatggaggggtagggggtggcagggagagggaggccaggcggccacagggctcacctccgtgtggtgcttgagaagacagagaatggcatggtgagagagtgactggatgtttccatgaacatcggaggagagaggaggccgacgatgcaactccgtggcctagcatgagtcttactccagaaggagggcgggtgtgtctcagagcaggaaggcacatggtgttgagacatctggcgtgtctgtgattgggaagaatcctggtctctccatgattaaaaaaaattttttttagagacagggtcttgccctgtcgcccaggctggagtgcagtggcgtgatcacagctctcttcagccttgacttcttgattttgatgctgtgagtctaagattgtgactcatttgctgagtctggggtcacctgtctctgtgggattgggtcggggtgtgcgcgtgtgaatactgggacctgctgaaaggccctgggtcttaacgggagggcaactatgtgttgagctttctgaccagactggtcaatatggagaaaccccatctctattaaaaatacaaaaattagctggtgtggtggtgcctgcctatagtcccagctactagggaggctaaggcaggaaaatcgcttgagacctggaggcggaggttacagtgagctgagactgtgactccgcactccagcctgggtgacaagactctgcctcaaaaaaagaaaagaaaaaaaaaaagctaagtttagagattcatgtctacatttttatttttcactttgacacactcaaacctaactttcccctgctcaagaccaaattaaaaagtaaccataacaataaaagtcataacaatgcccagagtgtctgaggcatcaccaataataatactgagagtgtaaccacacgcaaggctaagtactttatattagctaacatttattcatcactgctaggtactcctggttcataacaccctggaaaagaagcttctcttactgtttacatttggcactgagagaatgattaagttgctcggccaggtgtggtggctcatgcctgtaatcccagcactttggaaggctgaggccggtggatcacctgaagtcaggagttcgagaccagcctgaccaacatggtgaaaccctgtctctactaaaaatacaaaaattagccaggcgtggtggcaggcacctgtaatcccagctacttgggaggctgaggcaggagaattgcttgaactggggaggcagatgttgcagtgagccaagactgtgccactgcactccagcctgggcgacagagcaagactctgtctgaaaaaaacgaacagaaaacttacccaggctgttgtagggaggtgtcaaccagtatttgcccaagcttctattatctaattatgacattgctggagaccatcaacaattaaaggattaggagcataaatatttttgcttttttttttttttttttttgtgagacaaggtctcactttgtcatcaggatggagtgcagtcacatgatatcagctcactgcaacctccacctcccgggttcaagcgattctccaacctcagcctcctgagttgctgggattataggcatgagccaccgtgcccggctaatttttttgtacttttagtagaaacggggtttcactgtgttggccaatctggtcttgaacacctggcttcaagtgatcctcctgctttggcctcccaaagtgctggggttacaggtatgaatgaccatgcccagcgtatttttgcatttagttaaattctggttttgggcagttttaagatctaatttcaatgtcttttctgtagactgcagtcacttttggggtgaaacagggaatctgaacatgtatgtctcaaagtttgactttgtggctgggcgcagggctcatacctgtaatcccagcacttagggagtccgaggcagcaggatcacttgagcccaggagttggagaccagcctaggcaacatggcgagaccctgtctctacaaaaaatacaaaaaactagccaggcatgtggcacgcgcctgtaggcctagctactcaggaggctgaggtgggaggatcacttgggcctcagaggtcaaggctgtaatgggccatgatcgtgccactgcactccagcctgggtgacagaatgagatcctatctcaaaaaaagaaaaaataggctgggcgcagtggctcacgcccgtaatcccagcattttgggaggccgaggtgggcggattacttgaggtcaggagttcaagaccagcccggccaacatggtgaaaccccatctccatctccactaaaaacacaaaaattagctgggcgtggtggcaggcacctgtaatcccagctacttgggaggctgaggcaggagaatcgcttgaacccagtgggcataagtggcagtgagccgagatcatgccactgcactccagcctgggcaaaaccccatctcaaaaataaataaataaataaatatgaaagatgtggatacagaagtcaatgccctttagtttggcagcacagggattggtgagaaggacttaatgtggctctttctggtaaggctggatagaattcttgcgtacgtgtcttttccaatagacaaagtcgccaggctgcagatcatggtgttgtaggtctttgtctcctatgattgtgctgtggaaagattgttctatcaaaatatgatttctatccattgctttattaatgcctttaccttagtaaggctttattaatattgaagtatgtctgttttgtttttttttgtttttttgtttttgttttgagacagtgtctccctctggtgcccaggctggagtacggtagcgggatcttggctcattgcaacctctgcctcccggttgaagtgatcgtcccgtctcagcatcccgagtagctgggactacaggtgcacacacaactacacccagctaatttttgtgtttttgtagagacagggttttgccatgttacccaagctggtctcgagctcctggactcaagcgatccccttgcttcagcctcccaaagtgttaggattttacgagtgtgagccactgcacccagatggatatgtctccttttatcaattaagggtcaaaagcagaggaggccaagtgcataggatggcctgtgactatttccaaaggtgaaagtttatgagccccaaagagagtggcccttagatttaataataccaaaggaggaacttaggtcaaggaaggtgtagataaattctgccaactgggttttttgtttttttgttttgaaatggagtctcactctatcacctaggctggagtgcagcggcttgatctcagctcactgcaacctctgtcccctgggtttgagcaattctcctgcctcagcctcccaagtagctgggattataggcgtgtaccaccacacctggctaatttttgtatttttaatagggatggggtttcaccatgttggccaggctggtcttgaactcctgatctcaagtgatctgcctgcctcagccttccaaagtgctggggttacaggggtgagctactgtgcccggccatccaactgggtttttatagttccccttgtttgttccactgagccagaagattggggattgtagacagtggaaatgctgagaaattggccaaactgaactcacttgttttattatatggccagtaaaatgggctcctgatcacgatgtacttcaaggggagttccctaggtgggaatactttttttccaggagaattttggccacagctgaagcagtggcttgtctaccaggaaagcctctacccaataggagaatgtgcaaactgttactagtacatatatatatatatatatatatatacacacacacacacacacacacacacacacacacacacggaagtgggtagttggataaaatccatttgccaaaccttgaagggcccattaggtagattaaaatgtccaggatcgggatgtacacattttcctgagttaaacttacggcaggtggcacaagtgccaaataggcttttttttttttttttggcagcttttttttttttttttttttttttttttgagagagggtctcattctgtcactcagactggagtgcaatggcacgatctccactcactgcagccttgatctcctaggctcaggtgactctcccacctcagcctccccagtagttgaaactacttattttgatatttttagtagagacacgatttccctatgttgcccaggctggtctcgaactcctggactcaagcaatccgcccccttcggcctcccagagtgctgggattacaggcccgagagccactgcacttggccagtacagcttcttttaatgtcactccccctaatattgtttcataaaacaatttgtaagttccccagtgggtcagattatgtactgtagttaagaatattgacttggagagaactggttatcaggccttaaacacagcttttttttttttttttttttttttttcaaatcattgaactagcagtgtgatctttccaattttgttcttccgtttctggtgcccaattttgtgcatctttggtaatcatttttagatcaccttttggtggctcttttagctgggcctcaagagagatttgaggaaccgaacctttaacagcagcatcctttgcggcattatcagccaagactgtttcctctagcttccgcagaggttaaccttgaatgtccgggagtttccataatagccaaggcagctggcagctggatggcatccagtaagtcccgtacataggatccatttttaatttgacctccagtggacgtgagtaaaccccttcatttccatagcagtccaaaatcaggagcaaccccaaaggcatatctactatctgtatagagtaacagattgccctttcacgaggaggccagcaagggcagtgagt[131 bp omitted]aaaccctgtctctactaaaaatacaaaaaaattagctgggcatggtggtgggtgcctgtaatcccagctactcgggaggctgaggcaggaaaattgcttgaatccagtgggcagaggttgcagtgagctgagattgcgccactgtactccagcttgggcaacagagcaagactccatctcaaaagaaaaaaaaaaaagtagccacaggtaaggggcggcttcagcaacttcgaaggaagtggtaactacatatcttacacagtttttaccattgtcatctttcagatacgatccatctatatccatagttcagccagttcagcattatctagcggaaattcttgtaaacattttttagggaatcaaaagatagtgtcaaacagtcatggagagctgtgtgcagtggctcacacctgtaatcccagcactttgggaggccaaggtgggtggatcacctgaggtcaagagttcgagaccagcatggccaacatatagtgaaaccccatctctattaaaaatacaaaaaattagccaggggtggtggcgggcacctgtaatcccagctactcgggagactgaggctggagaatcacttgaacccgggaggccagaggttgcagtgagccgagattgcgccactgcactccagcctgggcaacagagctagactccgtctcaaaaaaaaaaaaaaaacaacctgtgggcctatgcctgtattcccttaggctttcccatggtggttgtggattggctattttaaagaaaacacgcttgaagggggaacttatttacatcgctctgatgttgaccatcccatagggccatggtcagccactgtaggatgttgttggattttggattggtgagatgaggaacaagtgggctaaactgcaagccacaaggggaaggggaagttttactaggccaaggtgatgaggtttcgttgagtttcaaacaatgtatgtcaggcctaaaagtggatgccaaggcagcaagtatattgtaacacatttatgacaggcatgcagagggattggagaatgggtaactcagggtgaaaatactccctcccctgttctgctaagggtcaccacgttctgaagctggagaactaggggtcaggcaacccatggcaagtacagcccagccagccctcagccagttcaagatactgatgctgtcgtgagaggcagccagggctctgacggaggcccgcaagatggggaatctgccagcagttgctgccaagttgcaggccacactttgttcacgggagaatgcaggctgcacgctggcactaccaagggcacaggctcaggcaagttgacctgtcaatatcatgagaggctacgaaataaagaccctaactcagcctgcatggctgtgatagaaatggctgtggaccctacaccctacccgcacccacggtcatcatcagaccggccaggcataggcacgcccactttttaggctgacaagtacctccagcaggtgctgctggaccgttacatcctcattatcattgcatcagagcatttgaccaccggccatgcccagctggctcgcgagatcctgcagcagggcgtttctccttcctctgctccaagatggagtttgccacccccaaagctgccaccccagcaccttctctgaggagagtgggctcagccagatcctggatggctgtcaacagtagctggaaggtcagggacatgctctggggtactggtggcagagaaggagagcctggacccttgagatactgcccaccccttccccttcgtcttccagcagaggcccagagtgggaaaagaggtcacccccggtaccagcgcatgactgaactagactttgtagtgaaataatgctttttagctgccattccctaacagtcggcacttctcagtcactggtgatagagaccaatcgcttgcattaaggagaaagagtatgtattggctcatttatttgcaaagttagaggattgcaaaatgctatgtgcccaatgcagacctggcacctgtggatgatggtggcatttaacatttattgaggctcagcataggtcaggcactgatatggtttggatctgtgtccccaccagatctcatgtcaacttgtagtttgtagtcaccactgttggaggtggggcctggcgggagggacggcatcatgggggtggtttctcatggttcagcgccagccccttggtactgtcctcacaatagtgaatctgttgtaagagctcgtggtttcaaagtgtgtgccacctgccccctcttgctcctgctctgggcatgtgaagtacctgctcccagttcaccttccgccatgattgtaagtttcctgaggcctccccagaagccgagcagatgccagcaccatgcttctggttcagcctgcagaactctgagccaattaaaccccttttctttataaattacccagtctcaggtatttccttacagcaatgcaagaaccgactaaaacagacaccattatgaactcaattaatcaccacaacacccctaggaggtaggtacaatcatcaccttattttgcagacaaaacagatgcccagcaagctttagcaacttgtccaatgccacacaggtggtagatggcaaggctgggatctgaacataggcagcctggctgcagggctgacattcttaggccaagtgctgcgctcatgacaggcgcttgagcccaggcagctgccagcacaacatggcctgctccagtgtagaagctgattgagcggtgctcatgtttcctgcagtggagggtgagaaggataccaatgtattcctgtgtctgaattgaaaagcgtgagttccacctgctgggaatgatgaagggactggagagccacaagcagcaggcattcctggtggccaggcccatcttgcagcccatcctagagcagaaggcctccctgcagcagtatatctagctggtgtccacagtggcctgctggcagcatcagcctgagtcctctgctggatgtaaagggggtggcgggtgaccggtacatacttacccactgttcagaaggctactgccagtttgactcctctgtcaaactgcctcaacgagccagcccctgcacaaaaccctggaggtgggacagggcctttggaccaaggtcaccagatcaccacggtggtggtggtggaaacgctaggccggatttccagagtgcctcatttcacccatccgggcatcctggtcacctgcagcacctccttcaccaccatctaccggatgcttcacacgcccctggatttggcagccagggacaccaagagtgtgctgattcagaccttccttggcaacactgaccacaagatcacaggtgaatccaatcaacaatctcagccctgagctgggccagcaggaggtggtaggttagggctgggagggcacagttctctctgtccccagccttgtgctgaaaggggctgggatggaagaaactgaagctccaactctcctggactgagttgcatgctgtctggtgccgtcttgccttgggtctcccatctttctctggccgttgcccccaccacctttcctactctggcaaacccccaaatcaaccagcaggaagaccccctggggaagcaggggtggggatgagacttggggcagacattttgacaaggcagggaagagctgggttatctagctggagaggatggtcaggagggttctgtagagatcacgacagtggggcaaaggatttagaagcatttcggtaaaagggcagtgaatgtcacagctctgaagggcctcgaggatgatcttaaatgttggaataatggccagagaggggaggctccttgcctactacagtcggtcaggaagtggctgtgccagagcctgtgctgggcctcctgtctcccaggcctcagccctctgtagagactggcattctatccacttctggcctgaccttctctggccctgctgagtgctttcttcactgaccccccgccccccctcacttcagttgtttctcacaaggccctggatccccatggtatgaaacaccagggctgtatgggatgcttgaaagcaggaggaaaccagggagacaaatatgtgccacgggcggcagggggtgggggagggcaatggatgaacagactcagccagctggactggagctgactgctttactgaacgatggattaatttggggtggcgagaccaatttggagacatactttgggaaacctcaaactaagatcatgtactgtatttaactgagcagatgagggttggtactgtaccaaatcgcagagtggatttaactgagggtaggttctggatttacattaaaggtgagggttgccatttctaagcaagagtagatgaggtttacgagaggaaagccactgtatttaaccaacagaaggcactgtctgtacgggtgaggcatggtatttggattaagggtaagtacttactacatttaaggacaagttctgtttcttaagtcaaaagtaggctttttttttttttttgagacggagtctcgctctgttgcccaagctggagagtgcagtggcgtgatcttggctcactgcaacctctgcctcccgggttcaagcagttctcccacctcagcctcccaagtagctaggattacaggcgtgcgccaccacgcccagctaatttttttttgtatttttagtagagacagggtctcaccatgttggccaggctggtctcgaactcctgatctcaagtgatccgcctgcctcggcctcccaaagtgctaggattatagacgtgagccaccatgcccagcctaggcactgtatttaactgggcatttaacccaaaggcaggtaactgtctttaagtgagagcagaagacacgagggtagttgctgtactcagctgcaccagtgtattttcccatccaaaacatacacaggggaggcttgatgccaccccaggaaacagaataaccccttctagggacttcttagcagagactgatctccatctgcccgcaagggctgggtgtccaatttgtcctgcttcccagagctgcatggtgggtagaggagtaagtggaacataagaacaggcttgcatgactgtgtttatttgaaccaccagatctgttccaataaagagctctccagaccctgcctcaccttacagggaagggcttagagtcagggaagaggggcctgttgctcctgtccctgaaaaaggaggtcaagatggagcccgggcttcctggtgaccattcagactcctcccactgcttgtccctgtggaggacacaggacgggctaccccatctcaggtttggggtgggatcgctcacagtcacccccggaacagccccaactgagggtggggggcctggccctggacacctcatgtctctgggccgggaagccacgatccctcatccatcaggcctgctgccgctctccaccccagcgggggatggacatctgtgctccctcgcagtacactgcggacccaggaggtcccctgcatgacattcctctccttggcctcaggccagcaggcggctgtactctgccagagcagaggactttctcaccccatcccagatccgggcagcgtagtggaacctgtgaggaggccaacagtcagggctgcctggccggggctccccccagcccagcaccaacccgggacaggtggagaaactgaggccccttttatgacctgagatgtgactctgagcctcttggaacccaatctcctcgactgggatacagggaggatcctaacagtgatgggaggtggcccaacttttcttagctcacccaggttatgcaaagctgaaggttccagggcttggactaagacctcaagtctccaccacctaaacttctcccactccacacagtgctggctttgtgggtgagggttcagtttccacctccctccagagtcttacgacatagaaaacatctaacagcagctgcacaacccacaatcttctccctctctcctctgggtcctggtttagaccaatggcaggagcagagctgggactcaaagctctgccccatctctgccctacaagccctgaggggcttcctgctgctttgtctgcactcctgaccccttccaggcacagccaactgcaaacagatgtagggagccaagttagagaggctgcacccagttaagctatttatctttccaatttttctctttgaagtaagatgaggaagacctggactcatatgctgagagctctggacaaagaagtaatgtaaagtaggggccacagagctagtgccgggccaagtgaaagcagggagagaaagccagaggcaggaaacaagacaaatgcagaagtgtgaagaatgagaccctgatggcttcctggttcccatctgctgcagggccctgctttctgtgatcaggtccctggaataaatcttccttaagctaaatctggtcactggtcctactcctagcaatcaaatgactcctagccacagatgtgtggccttgctatgtaacacttttccccgagcctaaatttccccaccaggaaaactggtgacaaggacctacatgatgctggctgattaggaggattcaaagtcacaggaaacagcatgttgccacatgggtgagatgcttacaagacagtagcaatcatcactgttccagaaaaggaacctgggatctggagaggaggggcttcacaaggtcatgccgatctaagggacgcccccttctctctacaccagggtggggtgcctcaaattgaccccctctgcaaagagctcttaccagttcttctcggtgaggatcgtgtgtgacagctgtggccgggccatggacatcacttggctccggagcttgctcaccaaggactggaaactggggtggccacgatacccaggcagcagggagaagagtgggctggaaccaggtcctggaaagttggggcagggagggtaagagggatagactgccagggtctttctcccagttaacagcatcctgggcttcaaggagcacctgagagttcagccccggctgagctcttcctgtacttctatgactctgaaacacactcctaataaagggtccacacaccccaggaacaaaccaggatcttctctcagaccaggtaggctccacactgctcccaaaccagggcaacccatgtcgcctcctagaccagtgggtgctgggtctctctctgatcaggataggacttgtctctccatgaacctgttgagggtaactgtacctgctcttggtgggttttcactctctgcttcactgtccatgaagggtaccaggaataagttgacctcagagtccaggaagtcaggtggaagccccgggaagacattgcattgtaacatggacagagttcctggaggagaaaacgcttcagccttcaggtaccatgttgtgggtttggggagtgggaattgttgacagtcaaagcaggatcaggagactagtctgggggtagagactgacccacggggttggatcaggaattaggaggctgactagcttggggggtgatgtgggaacccttacccttgtaacgcaggtgggagtgggccatgagctggtcaatcatcaggtgcatctgccgcagcttccgaggacagaagtcctctcggcgagctttgttctgcaagaagactgagggtgggaagagacgggccctgtcaggcagacatcgcttggcttcatggactcccctttctcaccccaaagacctgttgttacccctgagttcagatcactgtgtaaatatttatataacttcacttcactttagcaccaggctctgtgtagggcaatgctggggacccagaagtgagtcaggtctgatttctgcccctagtctctttgaggccctagcgagggatcataaaatgaactgggtctttgaagaagagtagagcggagaaaggatgaaacaggcaaaggaacggcatgtgcaaaggctagaggagggagaacaggtggacggggccacccagatgaacccaacctaatactcacttcctgagttgggagattccagggacccagaaataggcagacctggggcctgtcccattccagacacaggctcaggggtcatgccctcaactgtcaggattggaccagggcagtgggaacttggaaggagcagctaatcctttttgactttgctcctcacaactctcaaaagtgctccacccagaaccccactccttcctctctctcccctcttctccagcgtgctcctgactttcagcccctcatttttcctcctgcccacccctccagtccccagaaagcctctcacctaggtgggggtagtactcggtgccttcatcggagcccgatgagctgctggactcgtggctgggggatggggtggagggcttcaccatctctgctgtctgcaggaaccttggggtttggggtgagtggctgttgctcttgcacttgcaccccaggtcccacagcctgggacaggggcttcctttgagattctgatgaaagctacagccatgctcagaaaaataccatatacacaccatgtttctcacaatttcagagaattcagagataatcctctcagataccaacccatggacttaccaactgtataaattctttgagtttactgtattttttttttaaaggctattttttagagcagttttaggttcacagcaaaactgagcagaaagcacgtagcgttcccacacaacccctgcacatgcacagcctccctgactatcaacatctccaacctgaatggttcatttaagatccatgaagctgcactgacacatcattatcacccaaaatccctagtttacatcagggatcactcttggtgctgtacgtcctacaggtttggacaaatgtataaaggtgtgtgtctgccattatagcatcacagagtagtttcactgccctaaaaatcctctgtgctgtccctattcatccctccctctctccaacccctgatctttttactgtctccgtagttctgccttatccagactgtctgtatagttggaattacaagtatatagcattttcagattggcttcacttgatctgcatctaatgatcctctatgtctttttatggtgagatagctcatttcttttcagtgctgaataatattccattgtctagatgtgccactgatgatttatccattcgatttactgaaagacatcttggttgtttccaagttttggcaattatggatacagctgctataaacatctgtgtggccgagcacggtggctaacgcctgtaatctcagcactttggggagctgaggcgggcagatcacctgaagtcaggagttcgagaccagcctggccaacatcgcgaaactgtgtctctactaaaaatacaaaaaatagccgggcatggtggcacacacctgtagtcccagctacttgggaagctgaggcagaagcacttgaacctaggaggcggagg[138 bp omitted]tttttacaataggttaagagtacataaacctgttttctaaggtaagggataatgggattgctaaaatacagggacattctcctcatacacacacaaacacatctacaatctcaaggggctcccctactctgagaagcccacctgtagacaagaccttaaaaacaaggctctgccatgtgccggcctgagccaatactcctaccagaatgtaaactccccaaggagttttatctgttttctctcttttatctgttttgttcacacctgtgtccctagtgcccagaacagtgcctggcacacctagatgtgaatgaatcccagatggtggtaggaataggtgtttcagaatgaagtcacagctcagctgcattagatctggtcagaacaaccaactccccagcaagccttttttgctgttggccagaccctcagctcatccctgtccccagggttactaatacaaacattaagttttctccatcaactgcttactatgtaacagggactaagctgaatgctttaaattccttaactcactgaatctacacaacataatgctgctgatgaggaactgaggaggaaacagacacatgcccagtaagagctaggattcaaaggcactacctagctctgaaggcatctgcttcctaattccatttctcccctccctataagctcctgtcccttccttctgcctggtccgtgtgcccaaagctgttccccccaacacctcccagcggtctcctggggcctgaagccaggaagagcccttgtggccataggttctgagccagtctcttctggaggcatttctgcaatctgtggctgcttcaggcaggactcctgccaggtcctgcctccctgagtaccaacaggagggcacacgagcctgaaggagatgaacagcaaaactccacggatcagacaagccagctcctcatgctccttattcagcaaatttgtagtaaatatttactgtgtgccaggcactgtgtgaggtgctggggaccttgccctcctagggcttacattcgaatgggggagaaagatcataaggaaagctacagtatcctattaaggagaggtaaatgcaatgaaggaaaacacagaagtgagggagagtaacaggggatgctatgttagatggtcagggaaggcctgaagttgactcgaatggcacgagggcgagagtctgaggagatctgcgggaagggtatttcccactgagggaggcggagtgcagaggtcctgggctgcaggaagaacagccatgaggccctgtggctttaataaagggagtgagggcaggtgcggtggctcacgcctataattccggcactttaggtggccgaggcaggtggatcacctgaggtcaggagttcaaaaccagcctagccaacatggtgaaacccatctctactaaagatgcaaaaattagctgggcatggtggtgggtgcctgtaatcccagctactcgggaggctgaggcag[136 bp omitted]aggcagtgagagaagtcagcaaggtgaccagagagcaaaggactttgtaagccatgcacgggcagactttggatttattctggtagatatgtaaagtcagtggagggctgtgtgtgcgcgcagtgctttgagggggaggttagatgggagtgatttgctccaacttacattttaaaaggatccctctggctgctgtcccttgagtcagtggctcaagtctctgggcctttgtctcctgcctcattcctcctccccaccctccaacccctcagctcctcacctgtagagactgaggtctgtgaaccagtcctggacaacaatcaccacatggcagaccgtgaaaaggaaggcagcaatctggagtgactgagggtgggcaggatggaagggaggtgaggacctcttctgcccagactaatcaggagtccctgatcccaggactcagttcaggaggcagcaaggcaaggagccttcaagcagctactgtgtgcccagcactgtgatggcacttcccttacaggccatccctaactcaggaaaggtgggaattatcacccccattttacacaggcagatgctgaggcgtcaaaggggagggggtgggaaatgacttgcctgaggggcagagccaggagttgagccagtcctgactctcagtgttgtcctcttcctatagcccttggggcagccagggctcttctgaagcagaaactaagtggaccacccacacccagctctccagatcttgggaggatgggggtggggatgtaaaacctcagtcctgggcctggcttggctccctcacctgcatttcaacgtaagtgtggggaaggttgtactctggaggcagtttgcggtcattattgatgagatggtctaggatagaagggctcaggatgggctgcagcaaggaagagaacagagtgtcactcagatacccaagtttcacacgctcaaggcaaatacattgtctatctcaggacaaaacaaggtcagaaacaaaggcaggcaatttctaattagaacagcaaaaggaagttaaagaaaaaaaactcaaagctgatacacttttccagctcctttacaaatcactgttgctcgcaagcacctcatgcccaaagagaagaaactgctttgtgctaatgaatttttaacgtttactcaaatgagtcatgtcccttaaaggctcattttgttgtcagttgtttcatacgctttcaaaactttgctaagataattacttaggtaaaaaaaaaaaataattagtgtgaaaactggtgagaattttaaaaactgcatcagtatgtataagaatcagtggtgagctcaccggacttttttttcttaaaggaacattcaatcaaaaaactttaagagctaaattaaattagcttgatagtctactggcttcttactgcagtgaaattcttttagaaaggggctttcacaactgctcgcgttctcaaactccaaacattgagcagtgctctattctgtcttgtttaacttccgtcctcctcttcacaggtctctgacccagaccacagccggtttggtttgtctccaggtctccatggcccctgcacagggcctggcacacaaggctcacatcacatttgtagattttccactctgtgtcatcaatgccacagtgaccagaactctgttccaccaactatgagtgccaactaaagggccaggccctgtgccccagctctcacccccagagccagggctctgctctgaagagcttcgggcaggcagggagtgggaacagacacggtggcaaatcacatgctatggtgggaggtgcatatgggcaacagtggaaggggagggcttctgagaggaggccacaccccagtggagtcttgaggaagaagaaggcgttagccaggcaaaaacgcaaggcgagagcctattgtactgataatggtattaattgctaagggtatttagcacctaactcctgttgggtgctgtcattaggactttacttgcatcgatgcactgaaacctcacaaaacccctatgaggcaggcagtattgtttttcccacttaaaactgaggaatgaaaataaataacttgacaaggtcacacaattcgttggtggtttcaggtaaaaacgggatatgcgaagtccagagaagagagagatcagtgtgtgtgtgctgggggtctggtggctcctccagaggcgaggataggcagtctgagggaggcaagccacaccctccgaatgccagcttaaggaatctggactttgcctgagaggaagggagaagccgaggaaaactgccaggtaaacgcaggaccagtcagtgctaacgacagtgacgagcctgagcactaaccttgtgccaggtcctggccaagcactttgcctggattgttccactgaatccttgaaactcctaagaggctaagtacagttaccatccctatttacagataaagagctgtggtttaagggagtttaaaactgaaagtcacccagctggtaagaactaacagacaggatcagaacacacattctccagggcccacacttttcagcactatactagaaatcctttaggctactgtgtagaaggcgaatgagatgggggcaaaagtgacaagagactaagggccaagaaaagacacaatttgccccagggcagccagtatgtccatggcttgactggaagcacatggaatccacgcagggttctggcttaatcacattccaggaagaggctcaatgcaggatgtggcagggtggggcaaaggcaggcggggctggcacctgtgtgtccaggaaaacaatccgttcttgggtaataaagaagtcgatgccactggtctggttgccccctcgttccttcatttcagcgctctgggcccggaaaacataagtcctgtggagaggagcaggcaggggtgtgtgagagctctggttctcagccttggatgcatccgaagtgtgaccctgtgagctgagcatgtgagccgtggtgccctgcctgctccctaagcttttcatctgtggcccatgtcagggggtgggaggcgggggtagtgcatgttttgaagcacacaatttcactcctatccataaagagatccattagttcaattaatgaagccagtacactgaggtgttgaagggcagagactccgccagtctgccaggattcagatcccagctctgcctcttcctggctgtgtggctttaggcacactccttaacctttttccatcagtttcctcatctataaaacggggataaccacatgatcaaaactctgtgtattactgtgaggtcggtatgtgtaaagcccttagaatggtgcctgatatataatgatatatacttttagctgttaattatcaaataaacctactagatcccaggcattggagagagagcactgagtgccctccactcccacagtgagagagagtttgggtcttgttcccagcatcttcccctgtcaggtgagtctccctcacttctacgtgtgctgggtgctgggaatatgagggcaaagcaggcagagcagggccgtgccctaaaccactaagttcaacttggtgactctgtgacttgggcaaagtgattttaccttttgaaatctgtaaaatcagggtaatagtacctacctctcaaggggtaatttctatctcccctcaagatgcataatctgttgtctgacacaaagcaggcatccttccactttacaaacactatacggaaaacctcctatttgccagataccaggatatagcagtgaacaaaaaagactaagtcggcttctgtgaagcttctggtctagtttacaaattaccagaaatcagtaactgtgggtgttagaaagaagaggcgtgcagtgctccaagtgcagattgcttagttggtggagccagaaagggctgccctggagagggaaatgacaatgctgagggtgagagagaaagagggagttaattggcactgggtgggggatggacgcagaggaaggttgcatcggcagaaagtaggtggcttgttgtactaggactcaaagaccagcatggcaagagcagaaagatggtgcatgtgggaggggagggagcaagaagaggatacacagacccttgtggagcatggtaaggctttggcctatgagcctggagaagctgctggagagatgtaagtagaggagtgacaggatcagactgtggtttgaaaggtccccttgctgctatgtggtgaggaccgtacggtggaaaaagtggagataggcttacaaggcccagtgccagagtgcctcgctctgcctctctggccttatctcctaccactccccttctaaggctgccacgttcttctacacacactatgggcaagctcccacttcagacgcattgcccatgccagtccctttcactggaatgctcctcccagcatgctttttctcaaacgttccccttagcaaggccttccctcaccatcctatttaaaactataacctagtctgggcaacacagcaagacctcatctctacaaaaaataaaaaaaaatattaagggcatggtcgctcatgcctgtaatcccagagctttgggaggccaaggtgggaggatcacttgaggtcaggagttcaagaccagcttggccaacatggtgaaaccctgtctctattaaaaatacaaaaattagccggatgtggtggtgcacgcctgtaatcccagctactcgggaggctgaggcaggagaattgcctaaacctaggagatagaggttgcagtaagccaagatggagccactgcactccaccctgggtgacaaagcgacaattgtctcaaaaataaaaaataaataaattagccaggcatggtggtacacaaatgtagtcctagctactcagaaggctggggtcaaaggatcacgtgagcccagtctgggcaacacagtgagatcctgtctctacaaaaaattaaaaaattagttgggcatggtggtgcatacctgtggttcccagctactcatatggccaaggtgggaggatggcttgggcccaggtcaaggctgcagtgaagccatgatcaggccactacactccagcctgggtgacagagcaagaccctcgtctcttaaaaaatagtaataatttttaaaacctgtaacctaggcccaacattacctccctataacccttttccattgtgttatattctaacgtgccgaatagtgtgtttattttgtttactatcttccctattaaaatataagtcccacaagggcagattttttccagttttgtataccactgtatccccagcacctagaacagtgcctggcgcatagtaagcaattaatacagtacttgtcaaaactgaattaaatcaggcagaccagacagaaacctcttggtatcctgcatgtaagataataatggcttggactaaggaggtgggagtgaaggagggaagaaacagatgaattagaaagagaattagcaggaaggccaggcacggtggctcacacctgtaatcccgacactttgggaggccgaggtgggcagatcacctgtcaggagttcaagaccagcctggtaaacatggcgaaaccccatccctactaaaaatataaaaataagctgggcatggtagtcccagctactcgggaggctgaggcacaagaatcggttgaacccaggagatggagattgtgttaagctgaaattgtgccaccgccctccagcctgggtgacagagcgagactgtctcaaaaaaaaaaagagagagagagaattaggaggcaaaacctagacctgatgaaaagagttgatactgaagtctaccacaccacaggctgacgtggctcaaaaagacaagctgggtgacaggattctccctacctcaggaatctgaactgagacccatggggaaaatttgctagttggggtgaaaagctgaaatggaaagaatgttatctaagacctggaactattccaaaatggaaccaaactgagtcatgagtgagcagagaagaggagggagagaggcagaggaacctcacagctccagctttatgggatgtgtattcgcccaacagtggtcttcaccttttctagatctccatcagcccactctgagatctggtgcaaactagggaccttttccctagaagaaaagcctgactgcaaatgtgtgtaaaattctgcatacggccaacggtggtggctcacacctgtaatcccagcactttgagaggccaaagcgggaggattgcttgagcccaagagtttgagaccagcctgggcaacagaggaagacgccatctctaccaaaaaagttaaaaaccagctggtgtggtggcatgcccctgtagtcccagctacttgggaggctgaagtgggaagatcacttgagcctgggaggtagaggatgcagtgggctatgatcgtgccattgcacttgagcctgggtgaaagaacaggacactgtctcaaaaataaatgaataaataaaattctgcatatactgttaagggattaatggactcctgacgctcatccatggaggccagggtagtatcacctgctttacaaaaaaacagatccctgtatttttaggtaacttcaacatgtctctgttcttcaccaccccagtggctactatccattctcattccccattttgattctcccttaatgagatgtgtatctcccccattcccaaattcctacatttttccctttccttctctgcccccagtttcgggacctgtttctcaagttctcccctccccaaaacctgctcctgtgcccttatgctttatcttcataatcacattccatccttactcaagaatgttgttcaggccagagaatcctcatgtctgatcctccccagcctggagaagcagagccattttcccaaggtgacacagtaggactgaggctggtacagaaaccactctctgtctccagatctctttccccactctatttctcagatcgtatcagctaccattctgtgatacttgctctatgccaggtgctcattaacttttgccttcttgatcttattttattctccaaaaatctacctggacaggggatacgggaaatgaagtgacctgcccaaggtcaaccagttatgttgcagggctgagcctgaggtgggcccaaatccaaaaccttaacaactacatcatcccacttcttgtctaggacctgtaccatttcctgaggccaggcaggaagggagggagggagggaggaacaggattggatgccttggagctacacagatttagtccagcccattatcatcttcatctcatgaagacactgaggtctacagaagaaaagcaactttccaaagtcctttggtaacaccacttgaaacacccaagcccaccttgcccctgctcccagtgggtgcccacctccctcctgcaccctatctgatagcccctcacctctggtcctcctctggagtgttggctgacaacaatgacatgaccatggacttgcctgtcccctggaggcccaggacaccaaccaccaacacatcagtctgatccaacaggtactgtgggaaaatacataaatgactctgacaagtctgtcagctgctggagctggaatgagggggggactccagagacccttgtggctcccccacctgccttatcatatatgaagagaaactcctatagtcccaaccccttcaactaggcatagggcctctgttccgtgtcatggtaggattatgtgaaatgttttagacacaaacaacagtgtctgtgagaactctgaagtagaaaagagcctagcatggtcaagaagctaaaaggaagtcagtgtggctgaacacagcgggaaaaagggaagtctgatcttggagaagtgaaagtgagagtcacaggaacagaagggcaggttggagaagataggactcggcgactgagggctactggcacagattcctggcaaacctgggaaagcacatgaaagggagtggtgtgcaaacaggagccacccaggctttcgtctgtgtgtgtgtttttttgtttttttttacattcatatgctgttgtctgtgggatttaagagcccctctggaaattaactgagaccaactctgggccaccagctctgctgactttcaccaccagggggtgtaagagacactcctcaaggaaaacagctacgttctgaactgtggctgctgctccttagaattaccttaaaattttgttttgttttgttttttaaaagcgaatcctataggccaggtgttgtggcccacgcctgtaatcccagcactttaggaggccaaggtgggaggatcgcttgaggccaggagttcaagaccagcctggccaacatggtgaaactccgtctctaccaaaaatacaaaacccggctgggtgcagtggctcacacctttaatcccagcactttgggaggccgaggcaggcggatcacctgaggtcgggagttacagaccagcctgaccaacatggagaaaccccatctctactaaaaatacaaaattagttgggtgtggtggtacatgcctgtaatcccagctactcggaaggctgaggcaggagaattgcttgaacccgggaggcgggggttgcggtgagccgagatcgtgccattgcactccagcctgggcaacaggagcgaaattccatcacaaaaaaacaaaaaaaaaaacaactatctgcgcgtgatgtcgcacacttgtggtcccagctacctgggaagctgaggctggagaactgcttgaacccgggaggtggaggttgcagtgagccgagatggtgccactgcactccagcctaggcaacagagcgagaccgtctcctaaataaataaagcaaatcctgggcccaatcaggatttaacgtgctttaacacattaaagcagaatatctatggatgccctgttcaatcagtaggcattgatcatacatggctatttaaattagtaagcttaaacaacattaaaaattctgtttggttgtactagccacatttcaagtgctctaaagccacatctggggatagcggctaccatactggacggatagttcaaatatatatgatcttcatcactgcagaaagttttccttaatagcgctgaagggtagggtttggttttttgttgttgttctgttttttgtttttttaaagctccccagttaattccaatgtgagagtggacacagaagtggcaggggcaaggcaataaatggacttgaggctgtgctaataagtccaggctgctgggtaggagaggtgacacctctgggacaatctgagcaggggtgtgacaggtctaggggagaaaaagcagaagaagggacacaacatctgggagactggtgttatgtatgatgatctaggaatgtgaggtctgaactagagcagggggtggtgggatggatgggggtcactttgggggagtgacattcaaaacagttgacactgagacagcgtgggcttcttgttctttttttttttttttttactgagacagggtctcactctgttgttgaggttggagtgcaatgtcatgatcacagctctctgcagccttgacctcctggagtcaagtgatcctcttacctcagcctcctgagtggcctggatgcctcctgccaccatgcctggctaatttttaaatttttggtagaaatggagtattcctatgttgcccaggctggtcttgaactcctgggcttaggtgattctcctaccttggcctcccaaagtgctgggattacaggcatgagccaccagcaagggtttcaaccaaataagaagggtactggagcagggtccaaaagactcccctgctgtggatggcacgggagatcccaggggtcctggggtggtagtgagagtacttctttaccaatcggtaccaaaggagttctgtattttaccaactagcaagcacagccgagctagttgaaattccgctctggttaggtgagaatgttctgataccaccccctctcactgctgtaagttgcctcaaaaccctccagtctggtgttgcctacagagaggtggaagatcagaggatgcaggatgtgcggaagctcaggcagggcaggacccctcggtacctcgatggcactgtcacaccaattcatctggtcatccaccaacttgatgctgtgcttcatgcgctctgggggcagtagtttggcctgacccacgacagctggagattggagaaagcaggagacagaggatgcagtgaggatctgtgaggagacgccagttcccaacctggtactgcccagccccaactcacggtccatggctgctggtgcggcagtgcccatgccccggttctggatctggtacacaggctgtgtgggtctctgcccctccttctcccccttgggtggcgcaggggctgcagggggtggtggggcggtgccctcaggggtagaggcacctgtcacggccacaggccccttcccctcctcccgtggcttcatgagaacgatgggcttctccagaggggctggagcaggcggggcagcaggggctgttggaggtggtggctgttttgactacggaggtaaaaaaaatcccatcaatgggggcaatcccttccctaacggctccccctcctccctccttctctgctcacccgctctgctggaggttttgagaggatgatgggggttttctgcatgacggaagtgcttgtctcttcgctggcatcctgtggtgagggagggcagttactcatgaatggctctcctggacattccagatctttatgtaccatgaactattctaaatgccgaaatatattaactaccttgatcctaccaacagccctgtgagatagatactattattacccccactttacagatgaagaaaatgaagcctagaaaggttaagcagattgcccaaagtcacaaagcccaggcagcctggctgcagaaccaaatcctcaagcattctgctcagctgcctctgcgaggcaacaagcccaggaggaaaggaactaggagctagacaggtctgggtgcaaacctgatcccgcctcgtgttggctgtgtgaacttgaataaggaaccaccctcgccaccttcacttatgcctcattttcccatctgtgagtgggtatgggaattccttcctcacagactatgatgaggatgaaaggagagagaactcatcaagtgtctagcatggcacctgacacatggcaggtgctcactatgtgagagctgctggtggcacttgctatcctgatcacctctgcctcagccccctcctgctctggcaaagctggcaggctgatcccaagccttgacctcttcatgcctccccaacttaccctcagtctgctgaagaggggagaaatctgagtctgagtcccgttctttctctggttccttgagtaacctcatgagagtcttgacccctaactgtgtctgttccttcaccaatatactgaggacacttacttaaaccctgctcacttcactggcttacggtgaagaacaaacaaaaagacgaagtgaaagtgcttcgaaaagaagtttcaagggaaaaactacaggaggagaggctgtggacttccaggaggctaggaagggggagatgatacaggctgagtatctcttatctcagatgcctgggaccagaagtgttctgaatttgggatttttttgaactttggaatatttgcatatttactggttgagcaccccaaatccatttgcaaggctccaataaacatttcccttaaatgtcacgttggtgctcaaaacatttggaattttggagcacttcggatattcagtctatacctgggatgaacgctgtgagggtagagagaagacacacagatataaccaggcggcagaatgtaaagcactggtgcctgactagcacagaggaagcaggggagaggcgagagaggcattcaggataaggcccaatgggctgtcactgatatgggagaaaaaaatgggaagaggaaaaatggcagaaagatgccgaggtcagcacgggacacagaggataagaagcccatgggtgtgacaagaggctgccagggctcagtagcacatttagagacaaagatgaggtttaggaggtgcttgttcaaggattaaacctgaaggtgtggcgggataacattccccaggagggcattatgtggaaggaagagagactacgtgttctcatttacactgtggcccaagagaaggagcaagtaagagcccagctcactgtgaaaaaactattcttcatgtttgtacagttttatagctcagaagctggccccagttgtcacctacttccaccctacctgacatctctgaggtggacagggccctagagaaaaaagcccagggggcaggttctggcagtgagtcacctaggtacaggaggggagcgaggctgggcctgggcacaagccgatccctcctgattcccagcccagggcgctctctacagcaggcagagcgatgctatatgtgagactaagctggacctggatctgagtcctggacccaaagtttattgactctgattttggaaaagtcccttcacctctggggctcattttcctcattagtgaaaatcagatctatcatagaatctacctcatggggtagctgtaagggttcaggaagacccaaaggatgtaaaagactttgcacagtgcaagcacagtataggctgctcagtaaaaagagtaacagttgttgttattatgacatgaccctttaaaacatgagctatggcacctctcagctcaaactctccaatgccaatttcactcagtgaaatacaaagttctttccaaggcctaccaggtcctacatgatttggccccagttacttgacttcatctcctatctctctccctccttcctcatcaattgcagccatcctggcctcctatggctactccttgaacacgccagatatgggccacctcagggcctctgcgcttgctgttctttctgtctggaatgctcttcatctcagatgctggcatggcttattctctcatctccttcaagtctctgctaaaaagtcacctcttcagagagaccttctctgaccatgttatctagaacagtctcctttatcactctccaccttctttatccatgagggtggtaggttttgtttacaaatatatccccggcatctggattagtgcctggcacatggcaggtgcgtggaaccaaatagatacatgaatgctgctcctgggtccagacactcacccttctctctctttcccatggtgcaatgtagtccctctcccgaccaccaggcccagagagattctgggggccaccagagccaggctccttccaccgtcgccgccgctctatcccatagagtccaggctgactgtgtccagactcagacatggttacctatggagggaatgaggggatttcaggatgacagagtctcttcctactctacttggcatatcctagactatacgaagtcccttctttcttttttttggagatggagtctctctgtcgcccaggctggagtacagtggcctgatcttggctcactgcaacctctgcctcctgagttcaagcaattcttctgcctcagcctcccaagtagctgggattacaggcacccaccaccatgcctggctaatttttatatttttagtagagatggggtttcaccatgttggccaggctggtctcgaactcctgacctcaggtgatgcacctaccttggcctcccaaagtgctgggattacagatgtgagccactgtgcccaaccaaggctcttcctttcttcttttttttgagacagagtttcgctcttgtcaccgaggctggagtgcaatggcgtaatctcggctcactgcagcctccacctcacagattcaagcaattctcctgcctcagtctcctgagaagctgggattacagatgcccaccaccacacccgactaattttttttgtatttttagtagagatggggtttcaccatgttggccaggctggtctcaaactcctgacctcaggcaatccacctgcctcagcctcccaaagggctgggattataggcgtgagccaccatgcccggccaaggcccttcctttcaacagagctctgggcctgtggtagcaactgcaagctggttcccaacatccactcctgacttcttccaaaaaagtaaaaccctcagttctgagctaggtacatggctatccagaacaaacttctcatccttgtttgcagttaggtgtggccatgtgagtaagtactttctggctatggtatgacactagaagtgtggcttggcagcttccagaaacttcccttcacagactctggcacatgccttctgccccttcctcccagtgacaggaatgtgggtgtggaggttggagctcaagcagctatcctgggctgtaaggcaatttaatggaaggtacaataaaacaagacacaaggttggggggttccacgttaaccttgaattgcctacttcgagaggcagtgaaaaacaaatacacatctatctcttacttgcagccaaaactattcccaactattaaaatgctccaacataaataaactcacaggggcaagttcacataaaaataggatattctccttaccaaaatgcagcaaggcatttgcttacaaaccagcaatgtgatcctcagtccaacagctactcttgattagtcattactagtgtatgtcatggtggggctccagccacttactagtgtatgtcatggtgaggttccaacactcaagggcctattttcacctggtatcccactacatttcagtgtctgtctgtcttccgttcctgacggtctgccttccctcacagtgaatttcatttcaaggtgtctccagtgtttattctatttgagatgttatataatgtctggctacctatgcaacccactctccaccatttcagtatctgtttacaggtccttagagagttttcccagctgttcacacatcagtctagggtggtatttgactacttaactgtttgtagaactcagtggggctatctgctcaagctcagaagtcaggttgacaaagtgtggcctaggggccaaatctggtctgctttctgtttttgtaaatagaaagttttatcggaacatggccacatccatcaatttagaaactgtctgtggctgccttcttgatgcaatggcagagctgagacagacaatacagtctgcagggcctaaaataattattctctggccttaacagaaagttttactgaatggccgagtatggtggctcacacctgtaatcccgacactttgggaggccgagacaggaggactgcttcagcccaggagttcgagaccagcttgggcaacatagcaagatcctgtctctatataacatttaaaaaagaaaaaagtagctgggcgtggtgacatgcacctgtagtcccagctacttgggaggctgaggtggtgggatcacttgagcctgggaggtcaaggctgccatgatcatgctgcaccactgcactctagcctgggtaacaaagcaagaccctgtctaaaaaaaaaaaaaagcagaaccctgtctcaaaaaaacagtttgctgacccttgcttagcttggaagtatctgttaaatccctccatgaatcctcccctgccccacctcataatgacataaacaggtccctccgagactctccagaatggaagggtctgtttacaagatgcagtcataattttgctagccagacaagtggcttgtctagctcctctcctactgtgctacatgacctctcccagagccacaagccaggctgaagactgctttcctagacagaggaggacaagggcctgtttacagctgcttagggaaaatgactcattccataccgaaatgactgcttagtctgggatggagattctccccagaatctgagactcctccctcacttgcaattaagtgtctttacacattattctgaaatctacccagtgcttaagtacttgtcttcatgcctcaattgggatactgcccagccctgaggtttctgtttactggcctatgaggatgccctttcctgtgcaaagtaagcgcccctgtgtgaatgcttttcttttttttttttttttttttttgagacggtcttgctctgttgcccaggctggagtgcagtggcacgatctcagctggctgcggcctctgcctcccgggttcaggcaattctcctgcctcagcctcccaagtaggtgggattacaggtgcataccaccaggccgggctaagttttgcattttcagtagagacggggtttcgccatgttggccaggctggtatcgaactcctggcctcaagtgattcgccagcctcggtctcccaaagtgatcggattccccgggtaagccaccgcacctggcctccctgtgccctttattctgggagcttccacagtatctgaatgtggggagttccttggaac[138 bp omitted]tccaatgctgtttccgggctcctttggggattacccccaaacttaggaaagctggtctatttaagtgtctgctgatggacttctagggtgacttcccgaaaattaacaaatcgaatttacatatttttggggagtgtctcctcagtatttaggcatcgcttcacacactcccttcggggatctcccagaacctcactatttgcaaatatttggggagactctcccgattcctgagtatgtaagcccacttcgtggggcactccccagcccagaactgtagtcgatttgcacattttcctaaggactccctaggatttaaacttctctctacggggttctagaagggagcctcccccggatttaggcattgctttacaaagcttccctcggggaacccaactcaagtttctcgttacacgttattggggcggcctccccagtacttgacgggcagtttgcaggctgtacttggatctcgcagagcataagtttctcatttacacgttatttccgtcccccgcccccattcctgccaacccagtatcgaattgacggtcgccggccccctactcagtgccgcacccccgccggacgtcccagcgacctttcaatggccaaggcgggggcggggcctgccggagcgccccgcccgccgccggtgcgctagcctcgcgcgggctcgcggcccccttacctaacgcggctgctgattggttctcggggcgcggtgtgcgctctcccgtgacgggagtcgggtgggggcggggaggctgacccaagccacccgcctgcaaatggcgtctgggggccaggaacgtgggaaggagagaaaatgggcactccccactccgaaaccggcctcggcgtccgggttgcagcccctaaggaaagctgggccgaaggaagaagaggaggaggatgtaacgcgggcccgagctgagatcagttccctcaggcgactcgtcctgcgcatgcgctgagggctggagctcgagaactgaatgcgctcgccgggctgagcgtgcgtggatggaggcggtcggcttcagcacgcatgcgggttccggagcgggaggcgggaggacgccgcggctctgactcaatgcgcgtgcgcgcggttggggggttgagggtggggagatgagtagggaaatggatacgccgaggagccggcaggagggagagcggcccggatctggggttcgagttgtgcctcttcggtgatgttggcgggatgcagtggggtgggacgacagggaggaatttcactgttctgggctgagtgccaagaacacatgaatgaatcagacttggcgtgcgccctggaagacaccccggcctgtggagagactgccagggcctcaaatcacttaggaaagggcgcgggtccggttggaccttgaaggacaggcaggcgagggtactccagggaacagctaagcaaaggcggcgaagaccccgggggaagaggtctagactggcttggattcagggtccacctgggtgggaggtgaggcagcagaatgggcaggtcagaccctgaagggtctccagtgtcagttttatccttaaggcctgggagatgcagaatagtctgagacagaactatgtttaaaaccctcgaaggccgcgttggagaagggaatccgctccagggtcgaaaatttaaacacacgtgggcggagtcttgcgcgcgccaaagaggaacattgggcgacgggcgcggcctggagagcgcatgcgcattcggaagggtcggcagttccccagtgggcagagtgggtggatgggaaggttctagctttttatttgaaattttatttatttttattttatttatttatttagagacggagtctcgccctgtcacccaggctggcgtgcagtggcgagatctcggatcactgccgtctccacctcctgaaattcaagcgattctcctgcctcagcctcccaaatagctgggattacaggcgtccaccacgcctggctaattttttgtatttttagtagagactgggttttgccatgttggccaggctggtctcgaactcctgacctcaagtgatccgcccgcctcggcctcctaaagtgctaggatgacaggcgtgagccaccgtggctggtctaaaaaaaagttttttaaaattatatttgaacaggtattacatgtacatacacaattcaaacctctctggctgtatacaataaaagtaagtttccacctctggttcccattttcctttcctaaagcactggttcccggtttccttctggagctgctgttataataaagcattggagttaagagcatgtgttgagttcatataaatagcggctgagcttgaccaagtgacttaatactctctacttctacgtccctgtttgtgaattgggtgtggtataaccttacttacaacattgccgccagcattaaatgggtgagagtgcatagaacagtgcctgttgcctaatggtactgtgtgttgtctctgtgtattattttgtggtctaccatgctgatagttgtagattctgagcagccctctcccctccaggcctcatccctactgtcattgtcccagtaccagtaccaggtggagccacctctccaggctgccacaggtagaaacaccagtcacccagaatgacttgagtccactgttgatggattctggggaaagattctgggtgtttgataaagatacacatgacaggccatctctgtattatgtctatcagtgtccaattttacttcttcagctcaggccatatctgaatttctcaaccccagatcactcacgattgccagtttcacgtcagggcaaccctcagaggtagaattttcttaaaagagggaaagaggaggcctggcattgaccttggacccactgtgtaccaggctgtgtgctctctgctttatatacatcactataatcttctcccctaatttgtttaacagatgttggtccgcgcagtgactcacgcttgtaatctcagcactttgggaggccgaggcaggcagatcacctgaggtcaggagttcaagaccagcctggccaacatagcgaaaccccatctctactaaaagtacaaaaattagccgggtgtggtggcatgcgcctgtaatgccagctgctcgggaggccgaggcacgagaatcacttgaacccaggaggtggaggttgc[134 bp omitted]cccataggcaggaagcagcagggcctggattcaaacccgggcctggattcaaacccaagcctgtctcactccagagcaagcctacactttttccctggcaccggggagccagcctggtgatgagtcagcagtacagtcaggcacccagtgagctgccttttgtattagtggcatggtatgctgttctggagatatatcatactttaacactttctctgttgatgagcatttagactgttgctgaacttctgctcttacaaacatttactgcaggggtttgtgtgtatgtttctgttttctaattttttctttttcagacatgttcttgctgtctcgcccaggctggagtcatgtaatacagttgtggctcactgcagcctcaacctcctgggcttaagcaatcctcccacctcagcctgaggagtagctgggaccacaggcatgtgctaccacacccagctaattttctattttttgtagagacggggtttcactatgttgcccaggctgtctcaaactcctggctcaagcagtcctcctgcctcagcctcccaaagtgctgagattatgctacagttaatatcctggtacacgtggctgcatgtatatgttagtattgtcagtagactatctcatttgaagtgcaagtagaattgctgggtcaaagggtatgcacattgggaattttgagagccattgccaaatgatctgttcatgtctttattttttgtttttgagacagggtctccctctgtcacccaggctggagtacagtggcatgatcatagctcactgcagcctcagcttcccaggttcaagcaattctcctgtctcagcctcccgagtagctgagactacaggcatgtgccaccacacccggctaatttttgtatttcttgtagagacagagtttcaccatgttgccgaggctggcctcaatcaatccttccacctcagcttcccaaagtgctgggactacaggtgtgagccactgcgcctggccctgttcatctctttttcactttttgttcatttctttcatttatatgttgaatgaattatggaactctagtcatctgccaggcacagctgtaggctggagatcctgtaatgaataggaaaagcacctgccctttgggagcagatattctagtggggcagatgacatcagataaaggatgcttggaagaaaagaaaatcgggggtgaggattgggaagacattgcaaaggatacaaaatttcatttagacaggaggaataaattcaagagatccagtccacaacatggtaactatagttagtaacaatgtatacttgaaaattgctaagaggataaattttcagtgtcctcaccacaaaaatgataaatatgtgaaataatgcatatgttaattagcttgatttagccattgtacaatgtataaatatacaaaacatgttgtacaccataaat[221 bp omitted]gaggcaggagaatgacatgaacctgggag[136 bp omitted]gccagggaaggccgctttgaggggatgacatttgatcagaggcctgaatgcagttaaggaaggtcaggaaatgagccatctaaagatgctgaagaacggccagtaaaagaccccaaagtgggagtgggcctggctgtccaaggatggtcaaggtggccagagtggctgaaacagagcaagggagggaaagaagggcaggattatttagagacggagctgtagacagggccagtttacataaagtcttacaggccatggtaagcatttggaatttacttccaaatgtaacaaagccattgcagggctacaaacaagcaccggcttgttccaattaatgtttacaaagacttctccagtgaacaacaaaaattaacagtgattgcctatagggatgagggttatagacagatgtgggtcagggctatgggaacttaaaaagcgttgttgtttttttaaaccacgtaattattagctatgcgcaaaaatgttcagtgaaaacagtgctggttgctgtgaggagaatggcctgcaggggcggaagcaggagatgagaaagctggtgtccttgcctgggcaagaaaggatagtggttctggaagagggtggtgctaatagatgagttgagaagggtcaggaactgggatcttttttgaaggtagcgccaagaaattaaacatggggtgtgagaggaagcatgaatcaggggtgacttgaaagtcatcctagagatctgttgtacaacagggtgactctcattcataacaatgtgttatatgcttgaaacttactaaaataatagattttaagttttctcacaccacaaaaaaataagtatgtgaaataatgcatatgttaattagcttgatttagccattccacaatgtgtacatatattaaaacatcatgttatttgcagcattaaaaaaagttctagcggggaggggggagggatagcattaggagatatacctaatgctaaatgacgagttaatgggtgcagcacaccagcatggcacatgtatacatatgtaacaaacctgcacattgtgcacatgtaccctaaaacttaaagtataataataattaaaaaaaaaaagttcgagaggttttggtcctggccaactgcctgaagactgagacttttttttttttttttttttttttttttttgagatggagtcttgctctgtcgcccaggctggagtacagtggcgtgatctcggctcactgcaagctccgcttcctgggttcatgccattctcctgcctcagcctcccgagtagctgggactacaggtgcccaccacc[147 bp omitted]agactgaggctttttaccgggatgaggaaaagtacttttgatgggaaatcaacaagctttgaaattcttaactttgagatgcacgttggtcatcaaataagtggttggagttaggggaaaaagccggggtttgtagataaagactttctgactttgcgtcacagaatttagtttaattaattaatttattttgagacaaagtcttgcactgtcacccaggctggaatgcaatggcacgatcttggctccctgcaacctccacctcccgagctcaagcaatcctcctgcctcagcctcccaagtagctgggaccacatatgctctagcacacccggctaattttttagagatgagggttcactatgctgcctaggctggtctcgaacccctgggttcaagcaatccaccccatcagcctcccaaaggctgggattacagtcactacagagttttaaaaatacacacaaagatgttatggtatgaagagactcccacgtacccatcgcccaatattgacagacatctgcatttttcttgtcttatgtcttctatttttccctcccacatataagcatacttcccgccaccccctggagttttgtttgttttaagaaaatcacagataacctgtcattttgttaataactatacaagtatgctaaattttggagctgcctatttatagatgatatttaaagctatgatttgctgagatcatctaggctgagaggttgaagagagcagggactaggcctgagcatcccgcatgtagaagccaggatcctggagaggggctgagatggagccaggagtgtcaggagaggggatgacctggcgccatgggatcaaagggttccaaagagaagataatggactaaggagcagagacacggggcagcagctggaggcagatgtggggtccaccatggaaaagacatgacttttgatcccccatctaactgtgttatggaaccttctcagtatctatcaggaaaaatgtataagtacttatttttctttatttttatttattttctttttgggtgacatataacttaagtgtggtaaagtatataaagggcacagatcttaagtgtaccaggtaatgaattttcacaaatttatgcatccatgtaaccgctaatcagagaacatttccagcacccagacgtcttccttgtgctctttccctgtcaattcccctgctccagaagcaaccacccatctaatgcctttcaaaaacaggcacagagattcgttgtgtctgtttttgaacttcatgcgaatgaaatcttacagcatgtcttccgtgtgtctggcatctttagctctttatgtctggcaaagtcttttatgtcattctatgtagcaggagtttagaaccaactttatggccgggcttggtggctcacatctgtaatcccagcactttgggaggcggaggcagaggcaggcagaacacgtgaggctaggagttcgagaccagcctggccaacataatgaaaccccatctctactaaaaatacaaaaaattagctgggcgtggtggaggtgcatacctgtaatcccagctacactcgggaggccgaggcacgagaattgcttgaagctgagaggcagaggttgcagtgagccgagatcacgccactgcactccagcctaggtgacagagcgacagatattttgcagtttggtgaatagtgaactttaaggaaaatggagaatctaaaatgcttctgaaagttccagtgggatgtttataagatgggagaaattatagcatgtttgtgtgcagatgggaatgatagagggaaaagagaccaggagactttggagctgttttttgaggaggtgtggacagggtgagggggctagacttgacttgaagaagggccagctcatcctggaaaaagaaaggaaagttttatcatttgacaccccctccaaattataaaaagcactctcctggtttgtatatgttagcagctattccacacaacataaaagcttaaagcatgcctttggactgccagtctggtgttgatgatgatgatacagcttcctttatggaccataataaatagctgggctgggcatggtggctcctgcctgtaatcccagcactttgggaggccaaggtgggaggatctcttgagcccaggagtttgagaccagcctgggcaacatagtgagacccccgtctctacaacaaagaactgaataaatgttagtgatgtttatttttattctgagtggatggggcaagaaggaggggagagcagcaggcagtttgggaaggaagaggagcctagtggcctgagcagccaggacagggaggagaaggggaggccagaagacggggagagactgagcttgcagagtcccccgggtgaggcttgtgggcatactgacacaatggaatactactgtgtaatgaaaaggatgagcagcatggctgaatctcaccaccaccctgcagagcccaagacacagatacacaccagggcgtgcagcagggttccttccaaagttcaaagttgaacaaaaggaatcaagacaggtcaggatggtggttcctgggatgaagggggctgttggctgggagggaaatgagagctttagggggctagacacttctagcttgatctgagtgatggctactcaggtgaatgtatttgaagaaatatattgagattacatttaaaatttgtgtactttattgtatgttaaaatatatgtcagttaaagaaaaaaagggggcaggcatggtggcacacagctgtagtcccagctgcttgggaggctgaggcaggaggatcacttgagtgcaggaattcgaggctgcagtgagctacgattgtaccactgtactccagcctgggtgacagagcaagactctgtctctaaaaaaaaaagagctggactcagagctagactttgacaggagggcagtgggaggaatgggaagtgtgtgggtgttagaaaggtcctcaagggcagttgggggatttatgaaggggaaaggcccgtgactggctgtatgaccctgggaagcccctgccctctctggaccgcctttcccccacccagtcctcatgagagtgcaggcagaacagaaataggagaaggaaggagccaaaatcaccatgagactcagctcctggaggacagagccctctgattcatgtctgcagcccagctcctggctcagggccttcaggaagtgttgatttggtgaggggggtgcaaaacctgccagaagtgggggcatccaggcttgagccccacagtggagaatgagggcaggcgggccagggcagatccaagataattcagaacacaggatctcttgtatgttctcctaggttcttagtcaaaagccccttttcactggttctgaccttgcctcagctgaaatcaacatgggatggctcagctgaaaccaacatggggtggcttcaggccatcccaggcattcagagggttcgtttaatgacattcactgaggccctgtctatgtcaggcccttggtgttgaagacgcaatcatgaacaaaaatgaaaatacaatgtgatggtctcctgagtgtctgaatgcgccaggtggctaagtgctggggctctggggtcaggctgcctgggtcacatcctggctccaaactgctttgctatggcttcgggcagttacctcatctgtaaaatgggaccaacattgcctaccttgcctccttttgtgaggtcacttattaaaagggcttagcgtggtgcttgacccattattattattattattattattattattattattattattattattattactactactactactacttgagacagggtctcactttgtcacccaggctggagtgcagtggcacgaccacagctcactgcagcctcgacttcccagcctcttcaagtgttcctcccaccttaccctcccaagtagctgggaccacaggtgtgtgcccccacacctggctaatttgttgtcgttgtcgttgttgttgttgtttgagatggagtcttgctctgtcacccaggctggagtgcagtggcacgatctcggctcacggcaaactccgcctcctgggttcaagtgatctcctgcctcagactcccgagtagctgggattacaggcacacaccaccacgcctggctaatttttgtattttcagtatagacagggtttcaccattttggccaggctggtctcgaactcctggcctcaggtgatctgcctgcctcggcctcccaaagtgctggaattacaggcgtgagccaccatgcctggccagacccaatattattatcgtgatagggataggtttatgaggctataggagtatcagacagggcctcctggaggaggggacatattagccgaggcctacaggaggcgtaggaaggagtgtttgccagctaaaagggagtggaggcaaggaaagagaggtcccagaagaatgagtttggcaggggctttggcaacactgccaggagagcttcttgcaggggaagggtgtcagcaatatctggaggtctcatccagttcctttcttgagtccccgcctttactccccaggtgggctggcctccagaggaagggcagttcgtggcagtgggtggcggaggctccaatttagctctcagggatgaaggggcgaggctggctgtggactttaagggaaatccaaagatagctcaacagaaaaggatgactcgcagcctgatcttcccctcaagaggagggaagcaagaatgaatcagcctctcaagctggaatgaagttgcggcgggaagtcagtcctcggtttgtggcccaaggccactctgcctctgactcaccttgcagtggggcgggatgggtgtgaatctgggctctccagcccgtattcctagcttccggctgggggcctgaggggaggcctggctcctcttgaaacctcggtttctacatctgtgcagtggggtaacgagggtcaggagagtggttatggtgacttataaacagagctgggcacacagtagggcctctggaagtgccagcccccctcctttgcccccttccctttcacatcctctcttgagcggatgtgaaacgggtatgtgggtggtttggggaggtttggggcctctgttagtctcttgatgagtgagttgtcatctagattctggtaaggcatgaatagagggagaaaagcaacaaaaaatcagaaaaagggcagccacgcattgtgtgtgaaaatcaaaaacaataataaaaatgattcttggccagggacagtggctcacgcttgtaatcccagcactttgggaggctgaggcgggcagattgcttgagcccaggagttcaagaccagcatctgcaacatagtgaaaccccatctctactaaaaatacaaaaattagccaggcgtggtggcaggtgcctgtaatcccagctacttggggactaaggcaggagaatcgcttgaactctggaggcggaggttgcagtgagccgaaatcgcgccactgtactccagcctgggtgacagagcaagactccatctcaaaaaaaaaaaaaaaagattctctctcacatatttggttcctactaaatgcctctgggctactccatgttttaatcttcacagcagttccatggggaggcagtcccatttcacaggtgaggtaaactgttcagaggtgaagccacttacccaagatcacaccaccagtggatggtagaaccaggatttggaccctgatctgtctgagttcaaagctgttgctctttgcctcagatctgggcaggggactgttgctgaggactgcccagcctacagagttgggagggcacttacaggagaaggcctctgagacaggttcagacaaggcaacagtcttccactggacggtctgccagttaggagtgtagatatgtttagagagaaatggcaacttctggctttaacatttattacaaagataagagcagaggctggtgagttacacttcttcctccccaccaggtgctctctgcagctctggaaaaatggtgtcctctttgttgtcccaccagggggcgccacctccagccccgccccagcctcatacccagttcttcagctcggccagcggtaactgaagcctcccagaatcctggatccgggcccctagtaccctctttcccagggacccaggagtcctgcctccagtcgcctgcacttgtaactgagagctggaggtcgtccatagcagcatagtgagagtgtttttgatgagggtatgcagagtgggggtgaccatgttcccacctggggcctcaggtgggccaaggcctacccactttagccagcgtcccctccagcagccatcagcaagccaacccactccaagccagggccccctttggtccttgcacttgaggtgctttgttcagggctgggtcaggagtggcagagacgatgtccaccacctcagtactggggaaagtagcctggttcctcctcgtgggtcctggagagacagagagactgatggagaggcaggccaggaagagggagagtgagagtgggacacaccgaggtgcagacagaaaccggtgggcagaagtgggagacagggggcaggtgtttccgggccccgaggccagggggcaggagggcatttagacagagacattggatggacagccagacaatgtgcccaggacaggcagagagagagagagagaccaagcaaagagggagaaggccatcaagggtcagtgaaggggagagggtacaccatcttccttcactgccagtccagccccgaactgagtcctttcctccagacagtgccagagctgatgagaaaaggcggccttgtctcccagccatcccccgcccccttagccacatagggtgctggccacaggaacccttcctccaggatgccttcctgcccaagtcccagccccctcaccagctacttggactgctggctgggttctggaagctgcctcggccccagggcagtgctaagcagctcagtcagggcatccagcttccccgccagcgtgtcaatctgtttctccagggcccggtgtgagctgctcagattctgctgcaggtcatacaggatcatgtgcatctgggtgggaggagaggatcagaggtgtcggggctggggtcgacccccacctactccatagcgtaaggcaatggaaccaatattgaccacatccttatggtcctctgaggattaccctcgacaataactgttaccatgtattgaccacctaccacttcccagctacctgcccaggtgtttccctatatggtttaaaatcctcccaaaagccacagggagtgggaatcctgttcctgtcttacagctgaggaaacaggcatggaacagttaaatgacatgcccaaagcagctcctgaaataagacctagaacatagcaggtgctcattagatatttctagcatggatgatgcctgacttccaaatccacatagtcttttactgcattctctggctaggattcactagttgatccctgagggtttgtggattttctatggaaattcttgaattctgtgtttttggcttgataaccttcagaaattaccacctgccaattcctgcagatctgggccactgcctcgtcactgagacctgccatgcggttttggggcctgcatctgtgaccgtgcttaccatggcattgctgccaggggccactgtttgaactgtcgtgggctaacgagaaaaagcaaaggccaccagataagcagaagatgctgtgagccaggccaagggggtgttgtgacatcattgtccctaagcactggcgaaatcaaatggtctcagcagaagaagggggcgggtagctgagtcacgccttggccaggcaaacttgcatggacgtccctgttgccctgagtacccctccacaagagcagcagagattgagttttacggaaacaatgtcacctgtgtccttgtcagtgttgttcattttaattgtattggttttgccgtctatgggcttggtttgtaaatttgctttggttttattgtatgagctgtagttggaaggaattttatatccgtccacatgtaagtaacttaacaataaagataatttgaaaccaaacactggggttctttgtgcaattttttttttttcagtttgtaagggatctgtgcctttcatgaatgtaagaagctctgtgttgcatcattcattccttccttccttcattcaaccacagacctttactgacaggctgtgtgtgccaggcccctgccaaggttccctgttctagggccagatttccctccctgtggccccaacctcccccttcttcaagacctcctcccacgggatcctagtaccttggagatgtccaccatggagttcacttgttcccggagcttccggtgtttcagccgcacctggcggaacctgtgggaagaagtggggagtcagttttacaagcctggtccctgaatgtagctgtagctcaggggaggaatgaagggaggagaggcacatgaagaaacaaaacaaagaaacaaagttgtcgaagagctgaaagagtgggaggggatgcaccctgcctccccacgagcccccatccccagtagaaacccaggtacccaggtccgcagacacaccgagatatgcggagacaaaccagcacagacacatagagtcatgcacggtcagatccaggtgagacctggatgttgagtgagaccacacctgggtgtcctgacctggacaggcatggacatgcacacacacagccgtgcagagaggtgacttggacatgggtgcacatggacacgtgtgcatacaaagcggccctcacgcgttgatggcggccagcagcttgcgctgatgcctgcgggcagcatgagactccttcctgcgagtatgtttgtagaacatccaggcttcttgtagcactcgggcagcggactccttcatctgggggtgggtggcacagtgtccgtggagatagacccttacggttctgggaaggcagggctagggctgggactcttgggtcctaggggaagcaggggcgcctggactcctgcttcttggaagaggggtgtcccatgggtgccatatgcccatctcacctctttggtatactggatatccatcatgaagttgtgcacgtgcttctctgccttgttaaactccagcttccgggccaccacggccaccagcagggctgtgcagcagacaccctgtgggcacagcaggcaccgtggcatgaggctgtgccaccgactccctccttgaacccgcccaacagccacagacggtaggcacgaccatccccagttagcagacaagcaaagaggctcagagaggagagccaaggtcccagctcagagcggtggagctagaatcataaatcgcatacgtccgagcccaaatttgatgcatagcattcacaccctcagggtggcctcttgaatgaaggataggattggaggagtgagaggaaggctgggttctgagccaggggcaggcctctgggtcctcagtgctcatgtggtcagccattgcactgtggagggcgaccatccttctcccactcccacaacttcttcctagctccagccctgtcttctctctcctggaccgtctccagcctcccactcatcctcccctaacccccttggtcccctctaatctcccaggcttccactggcctgaacgtctcagcctggctcccaaggccttccaaggtctatgcctcccacctggacaactcagccctggctccatgctgcctgccctccctgagcaccttcctccgaacactcattctcctcccttccttctcccaatgctcctggcccttcaaggccttggcaattcctagctgcttgtggcatctgctcacctgtccccaagttagaaggaatcttcctaggaagcatccccaaccctatagtttcagctcttgatcactcagaacaacttccagtcacaaacgctggctccaggggactgcctgggttccaagcccagctctgagcaagttatttaatctctcagtatttcagtgtctcatctgtgaaatggcctcacagggttactaggtggatttcatgaattacccctggcaagtgtgtagggcagagactggcacagagtatgtgctccggaaaagtaagcttttatggcccaaccatgccatggagcctttcttccaggagcaggctgtgagctcaagtgcacatcaccctatctctctaggtttctgtttctccttttgtcaaatgagggaggaggtcctgagcggtgctgcaggtccctaactgagtctctgcccctcttcccttgctccaaagactcaccactgggggagtggaggtcaccacatccttcacctgtgcacctagggattgggggatgaatatgtccttcctaggcccacatctgggctaggtgctggtggcttaggtccccgagggtgaggggaacccgatcttgtagggaggtgaaggccaaggcattaggtgctagtctctagagggggccagggctgggtgggaggacctgagtgactgggtctatggagggaaggaggtggatgtcagggttcaggaagaggctgactcaggctgcagagcctctgcctcatccttgagggcaacaggagctggtgtggggtggctggatgcctggccacccctagacctgtttactgagcacctcctgtgggctgggcactgttggaagcactttacgtagttggacccatttaatcatctcagcaagcccatgaggagcatcagcatccccattttatagatgaggaaagtgaggccccgagagatcacgtggctcgcctgagctccccagccaggaagtggcagccgcaggattcggacccaggtagcctggccccacaggtatgcacttgataactggactctacacccttgatggaggctgggagacgatttcccagttctggaagaaaatggggctgcgaagtcaggagcctgggtccctgaggaggataagggctggggccctaggttctagagagagcaaggacttaggggctggattcctaggtctgattttttattttattttttaagagacagggtctcactctgccacccaggctggagtgcagcagtatgatcatagctcactgtaccctcaaactcttgggctcaagtgatcctcccaccttggcctcccaaaatattgggattacaggtgagtatcttgttcttgaagagagaatggggctctgggggccccagacactcaagtttctcaggagctgtccctgagagcctgtgttgaacccatttaatcatggcttcctggggccagaggatgaccagtttgggatagggatcatgtccccaaggcagctgtactcaccatgactccagtgcacaggcagacgatcttgccccacatggtgcccggcaccacgtcaccatagccgatggtcaggaatgtgatggggatcagccaaagtgtgtctgaaaggtgcccagtggcattaacagcctgcctatggggaagggtaggttagttctaaaaccccaccatagaggtttccatgatattcactccccttccctctataccctcccatccccttccctctggttccctcccttcccctcccagtatacacccatagtcctaagaatcacctggacaaaaagccattaagttctgagctttggaaagcctgcatggcctcctctctgctgtgtgacctgggcaagttgcttagccactctgggatttgagactgggtctggccaatcccaatgccggtatggtctcagctaggctacccgggctgctgtagcattcagagcgtgtggttgagggtggagagtcgatagggggccaaaacccagtcagaccctgactggtggctacatccacccagaggaaggggtatatttttctaatttccacaaagatgctgtgtggtccagaagtggccctatcaggaccaaaaaggactctaaaaaggcttggtgggactcggccttcctttcctctcacttcacagaggagacatttaagtccagccatggaaggggttgaaacattgagatttgtctaactttgtccacaggccccttgccgcaagaccagcagggaaagcttcattcatgagggcccctgacaccccagacccaccgggttggagtttctaggagcgaagatggaatctgtactgttcacaaaccccaccccctcattccgaagtacattctagtttcaggacttctgccttggaatgtggaactttgacttcctccccattctcccatcattcaattgagaaacatggtggggggatcattcattaatcctgattctgaccaatttcccaattgtgaaaactaagatcctggaaggtgaaggagtttaaactcatgacagagggcgggcatggtaatcccagcactttgggaggcttaggcaggaggatcacttgaaatcaagagttcaaaaccagcctgggcaacacggtaacgtggtctctactaaaaatacaaaaactagtcaggcatggtggtgcacatccgtaatcccagccactagggaggctgaggcatgagaattgcttgaagccgggaggcagaggttgcagggagcagagattgtgccactgcacgctagcctggataattgagactccagatcaaaaaacaagaactgccagggagactacagatggtggaacgtgacatgcatttttcagatgaggaaactgaggctcagagaggagagatctaaagccagatcttctcattctcctcctgccctgaaggatctttgccacatacactagaccagaggttctcaaccttggttgggccatagaatcacctggaaggcttgctaaagtggattgctggccctaccctccaggattcagtaggtctggaagggacctgagagttttcatttgcaagttcccaggtgatgctgctggtcttgaaatcacactttgaggaccactggctgagatcactcccaacctcgtttttctctgaaagggatagaaattgaggcgcggcatcgggttacacagtatctagctggcaaccaggatctagttccaattccctgcttggaattattttccagagcagttccaaatcatccccttcctaggatcacaaaaagcacctacctacagtgcattccgtgctaattgggaaaatatgtctccttcctccaaggcagaggcaaccctttaggcaggtcccagagataggttcggagaccgaacagatggcctgtaaacctgaggcagaggtcaggcagccggaagggaggggctttctagggtctgtgtgtgcgtttggggagactgaaggctgcaggtggaggattggctgggggcttgtctgttggttcctctcaccccagttgatgggagtgtgggcaaatttcagccagcaagaggagaaggggtcaaagtgtgaactttctccactgcttggtcctagggggcctcaacctgcaccgcggcacaggacggccgccgtggctgtccggggttcccccctgcgcatttatgcctccatcaccctcacctctcggccacggacagcacccaggcggtggtcagccagaggccaagcgtgaggccgagcagcaggcggccagggtgcgtgttcatgtaaagcttggccacgaaccagtggcggaagcggacttgattgagagcgccgatgctgcggtaggaagcgttgagcaggacgccgctgcgcaggagcacggcgcggggcaccaggtagagacgcagcagcatggccagggacagcagcgcttccccttggcccaggaatcccggccagggctgcggggaggtcagcggcgcccctaaatcctgcacgcacggcgggccccgcacgggcgccgggtgcagcccacacaccaccagctccagcacgatctgcgccgcctgccgcccggtcagcgccacgcgccagtcccgcagcccgttgtcggtcatgaacagctgccggtagggggccaagaagggaggggtcaggagcaggtcaggcgcaggtcaggcggcggcccgcgcctgcctgcgccctgagataagtggggtgtgccgcctggccaggagggagggagtgcagggcgggagagggatagggagggagcgggacaggacttgaggaagacatctttccactttttcctccttccccaccacccaccccactagtttcagcccacttccagcctttgaacactgactgagcgccgactgtgtgcctgacattgttctatgtgctaaggatacacagtgaacccaacagacccccctgcctccctagagcttgcattccacatgcctggagctcgctcctactcccctttcggttgacacgcgtaataactgtaataataatatcagcaataacaaagccatgggccgggcgcgatggcttacgcctgtaatcccagcactttgggaggctgcggtgggtggatcacttgaggtcaagagtttgagacaagcctggccaacatggtgaaactccatctctactgaaaaatacaaaaataagccgggcatggtggcgcacacctatagtcccagcttctggggagtctgaggtaggagaatcacttgaacccaggaggcagaggttgcagtgagctgaggtcatgccactgcactctagcctgggtgacagagcgagactccatctcaaaataaacaaaacaataacaataacaaaatcagcatgtactgggcaccgtggatacgccaggtactgctctatcccgtttacatattgtgacttagtaaatgcccacaacccagtgagattgatattattattgcccccattttatagatgtggaagctgaggcccaggtcccttccatgggcaatggcgcactgggctacaggctacttagctactctatgataagatgataatgtgcactgtttactgagcacctcttatgtgccaggcactgctcatagaattgccacacatggccaataatccccattttacatgcaaagttatgataggagagggggaagaggggaaagggaatggagcaacaggatctggggcaatgggacaataggggatgggatgtgtctgggtgagacccaaggtggggtatggatggggagagctcctgggtctggggcaagagggaggttattggcacagagatagggtgattaggagtgggcacccctgggaccggaccaggtgcagtggctcaagcccgtaatcctagcactttgggaggacaaggtgggcagactgcttgagctcagtagttggagaccagcctggacaacatagtgaaaccccgtttctactaaaatacaaaaaaattagctgggcgtggtggcatctgcctgtagtcacagctacttgggaggctgaggcatgagaattgtttgaacccaggaggtggaggttgcagt[131 bp omitted]ggatgccatgtcggagcacagagatctgggaagctgagtgcctgggagcagagtggacagaggcctgggggcggaagcagggctgcaagggcactctcagcatccgtgagtgtgcaagggggggctggggactacaggggaaggcggagctggtgggggaggctctgcctgtctgctcatggttcatcccatctgggtaggtgagggtgtggacgcagcacctagggcagaagaacttcattactcagatcaggaggaggaggagggtggaaagtgtgagctgacagggcgctgagggggttggagggagcaaggcttaggggcggggcctgccctacctggacctctttggcatgaaaggccacgatgaggcagaggagtaagaaggtggaaatgctgatcgtgcatttaaccaggaacaggtagagcgcccactgtcaggggggacggaaaaagcggtgtgagatcccaggtctccctccgcctggccctccacctttccttcaaaaccaccattttttttttttgattcccaattttcctagcctccttcccctgcaaatcagtccctcttgatgtgtcggttctggagaagtctcaaaaccatcatctgggcccagtgcggtggctcacacctgtaatcccaacactctgggaggctgaggcaggtggatcaccgaaggtcgggagtttgagaccccctggccaacatggtgaaacccagtctctactaaaaaaacaaaaaattagctgggtgtgtaatcccagctacttgggaggctgaggaaccagaatcttgaacccaggaggtggaagttgcagtgagctgagagatcgcgccactgcactccagcctgggcaacagagcgagtctccgtctcgaaacaagcaagcaagcaaacaaacaaacaaaaaaacaccatcatctggtccccaggaatgctctctttctccccaacaggacaaccctgtccagatgctggtgtctaccctcttcctcagctcttctcccaagacccatacccatgaagggggaccttgaaactcacattccttcttattcctgtcccatttcacatcaaaaatagttcttcaggtgtgtgtgtgtgtgtgtgtgtgtgtgggtgtgtgtgtgtggtgtctagaaaaagacatctagcctctagagagtgccccctccccttcccttcctacccacctggtgttgtcctagaaaccaacttcaatcaaccccaaccccagatctggaagaatgtagaaactaccattcaatcctcaaagactgagtcacacccttctctgctctcatccggagggctgagtccctgagacccagcctcagctctgagacagccccctcggttctgcccccctgcagctccccactgccacccctctcttctggctctaagcccagggcagatctggccggaagcacagggcctccagaaaccacggagaaattgttcctttttttttttttcctctctttgtgtggcacaaccttggaggaatctagaattctggagagagggatttagaggggactgggactgttggatttcctaagaggggttggtccctgcctggcgggtatttgcagggggaggggaccacctgggcgtccttacaaagcattgcacctgtttctcctaagagggctgccagctcccctggctgggccagcatcccgcctctgagcaggggaagagggccagtttcctgccccaggggcctgctccccaaccccctatcagaacaatagtgctgttgtcaccagccctcccccaccttctatggctccctggttccctgcctctttcttcagtctgtcttaactgcccacaccactagacaacaagctccctcctcacactgcaatttgcttctctggtggtcctctctacttttccatttcctcttcccccaaatcccggacctgtctgcacttgggcctgtactctgttctctgaatttccctgtctctagggatggttgttgctgtctttctatgtgttttgagggtctttgtttctattgtctctttttttttttgagacggagtcttgctctgtcacccaggctggagtgcagtggcacgatcttggctcattgcaagctccgcctcctgggttcacaccattctcctgcctcagcctcctgagtagctgggactacaggcacacgccgccatgcctggctaattttttgtgtttttagtagagatggggttt[144 bp omitted]tggatttctcagtagcttgatagccctatttgtctttctctttagctgtacttctctatctttctgcatttttgtctccatctctctttttctctccatgtatctctgtgtctctgtctctctctgtacctctccccatccctcctcctccaccccacctggtgcttttggatatctctatccagttcccttggactccctagggttttgcacctgcctctctgccagcccctccccctggggagcaggtgtctgggtcctttgcagaaatgagctcattagattgagatggaggtggtgaggggcggtggatgttattaagagagtcctcaaaaggggactgaggagctgtggctcaggcctgtaatcccagcactttgaggcaggaggattgcctgagtccaggagttcaagaccagcctaggcaacaaagcaaggtcccatctctacataaaataaaaagggtggagggtgacccttagggtcatgtattttaaccctcaccccaatttacagatggggaaactgaggttcagagggttgtaacagcttccccaaggtcccactgatagaggcagtggcctggccatggtggagggaaggaagaaatgaggggtgagaaagcagaggggtgaagtggggtaggatggaccccgtctcttcccatctgccagggtcactgtgttcccacctcggcttctgggtgcggtgcttcggcgtgggagcggcgggcaggccccggccatgcttcctgttggcatggacttcggcggccccaccccctcagtgcccgccgcctgccagaggaagctgcatgcctgaccctccatgtggctcctggtcacttcagagctgcccaccaccccctccagatccaagtcggaacatcagaccctcaggaatctacccaatcttcatatcagtgtccgcatctggccctaccagcccagttccacaacccttctgccagagaggtctccagcccctcctttcctgttgagcaagtctgttctcccctcaagccacttattccaacccttgtccttgatctgccccatcactggcctgaccagggctggaatgtgacgggagcctgctgagacctgccctgaccccactttcccctttcttccctactcaccactcatcttcggagtcagcccctcttccccaaaagcaatcaaaacccccttctccttaagactcaggaatccaggacccagccccctcctctcctggtacctaggagtccaggccactgtaagcctacctctccactatttccctgactaatcagcatgcagatttggggagaaattgagcttgttaacagtggagactgggttggggttggtggggggaggcaggtcgggggagaggtttgtttcccatttcccatccccacccccaaggcagttttttctgtcctttgcatctaaggcactgggtaaacattagaggttagacaaggaccaaagagctgccgcctactggaagaactttgtctttcctccactctcccttcaccaaacctggggctacctctccccttattggctcttggggggcttgagtgtctgatcagccaccctctggcctccaggggtcctggacctctggccgtctaatggcaacatcttcaaagactgaaacactgaaacaaatattcccttccttttgcagagaaggaccccagcaactgtctcctgggagcacccaggagtcccagccaaagcccctcctccctcagacccaagagtctaggcccccaacctctcctccctcagatccaggagtcctgacccccagcccctcctccctcagacccaggagtccagaccccagcccctcctccctcagacccaggagtcctgacccccagcccctcctccctcagacccaggagtccaggccctcagtccctcctccctcagacccaggagtccaagtccccagtccctcctccctcagacccaggagtcctgaccctcagcccctcctccctcagacccaggagtcctgacccccagccccccctccctcagacccaagagtcctgacccccagcccctcctccctcagacctaggagtcccagctcccagccaccatgccccactcaccgagcaccccccgaaccacagcatctctgcatgcagcaccatgagtccaatgccagttcctgccagcaccagtgcccagccggccagagacttctcctgctccagcaagcgctttcggcgtctcaaggcccccaggccaagcaccagatccccgcccatggcccccggggtcttggggctcagccagcttcctgcccagggtcccccacctcgcagcacgcacagggcagccactgtggcttgcaggtcgtcagcctgctctgctggctctgggacttttgctctgaggcacagcagagccctgtgccctctggggagtggtgacggccaggcagggcggggaggggcaggggaggccccagggtagggggaggctccccagctcccccttttgagaataaggaggggctagggtgtgtcttggggcagagcaagaaagagacgtccatccacgtggataaagacacacacagacacacgatgggctttgtcacacacaatggtctgtactttgtgacacacacctctactcaccacacccagacaccgaaggacactccacagcccaagacggagactaacacaccagggcacacaacacaacctacacagagtgactcacaactcccagcaagctctgaaacccacagccacacccagacaccacacacatggtgtgacacacaccagcacttagcaagcaggcagtatcccgtggcacacacagccacccaaacaccgtccacacacaggcacaaatattacactcaaagttgtcacaactttctctgacacaaagagccacacccaaacaccacaaataggacgatgcacaactgtggccacacaaacacaacatacaccaggtgttacacaaacacacaatatatattaaagtagtgacgccctgatgccacacaccacacaccgacacaaacactgtgcagtcccagtttcctaaacactacacacccttggaacgaaacccaatacgtgtagacacacaacatttagggacatacctatagtagcccccaatcacccagagctagagaattgcacatacattgtggcgcctgttgactcgaacacaagtgctcgcagtgatgattcaaaacacgcactgattcagcatgctctgatgtgtggtgcgattcaaatgtatggtcagaggacaagctgagtggatgcatgcagagacctacaaggtacagcgacacacggagaaacccaagaagcacatgcctgaagcaagatgattctggtatattctggccacacaggacaacatccaggatgatgccctgggggaaggggatggggttggaccttcatagaccccagtgcccaaatgcaacatacggctgggtgcagtggctcatgcctgtaatcccagcagtttgggaggttgaggtgggaggattgctggagcccaggggtttgagaccagcctgggcaacatagcaagatcctatctctaaaacaagcaaaaacaaaaaaacaaacgcaacatacaccatcacctctgagccatgagccacacccaaacatgacatacaatacctccacacaacccaacacgttatattccaacatgcgtggccacacaacaacatacgcggagtaatacaccagcacacagtaacgcaaaacacataaacacaatgttttccaacacacccaaccttccacaaacgaccacatgtcccataaaacaccagatgtcaccactcactgatactactgacactgaggtctaccgccacccacacaacaccagcatcgggggaggggggtgtatcctctgacacaacataacacacagctacacaaacacaagacacttggggtggttggcactcagggtgggtgctgggggctgagaaggaagaggcccccaacagggacatggaccctgacgtgagatacagcaaatgccagtgtggaatgtgcacggtgactctcagagcaacacacaacataggacatctccatgtgtcgcagcacgagccactcatggatctgtacaccatacgctccgacacagatcaaaccctcctgtggagacacacaggcatgcactgacctggtgacgcacatcacctcccagcatcatgcactgaactggtgacactgcccttggcctcatgcacacccctctgcaaggaacctgcggacacaaccctccccctccttgtgtcctaggtcgtgtgggaccctggacccaccagccccagggaagcgagacacgcacagacatgtctgactgcacaccaaggcagcccacacaaacacacccagagacaccaaaccatacacatggacacgcccagtggcaaaaacacaacccttgcgggggctccgcccctcggcacacacaattacccactcggcgagacttggcgggagagggctggagacacacccgggcgcgcccagacaccacacatgcgtccacttggggaaagtgcagccgccgggcactcctgagcctgcagcctgggcacccctgcccactggccgcccggctcgctgcgtctctctcctccctctccggctctttctctggttctttgggacttgcttcctgtctcagtctctcctgatctggaaacctccgcgtttgtcttttttttttttttttttttttttgagatagagtcttgctctgtctcccatggctggagtgcagtggcacgatctcggctcactgcaacctccacctcccaggttcaagcaattctcctacctcaacctcccgagtagctgatattacaggtgtgcaccaccacacccagctaattttcgtatttttagtagagacgaggtttcaccatgttggccaggctggtcgtgaacttctgacctcaggtgatccacccgcctcggcctcccaaagttctgggattacaggcgtaagccaccgtgcctggccaggtttgtctttatctctgtctctgttcttctctcctggtacctttgtctctctctgtctctcttcactctgtctctctgtctctgcctctcttagcctctctgtgtctctctcatcgctctgtccctttctccatcttcgtgtccctctctgctcctctgtttccttctttccccgtcactgtctctctgtcatgtctctctctgtgttcatcattgcctgtgtctctgtcatcgtgtctcactctgtctccatctctccgtctctagggccctctgtttttgtctgtctcttgctgaatcggtgtttctctccgtctctgtttcactctctccctgcctcctggtctcctcttgggtctctctctctctctccgggcctctctatgcttgtctctgcctcagtttctctctgctgttcactggcacatctacggacagcctggttccttccggttctaccccagtcccactcaggggttgagggccagtgatccagagactgtggccacccaagggtcagaagccactaaatagcgctccagctgcggccatgccatggcatctgtgccccagttcaggcacttgtgaaaaacggagacagagactgacacagagggagagagagataatcagagagacctcgaggcattcagccagggatggtgggggcatgtattaaaaaaaatcaaagagacccacaggtgcagagaaaccggaaaacacaatcaagacacggaagttagagcacagagaaattttgtctccaaataggccatgactgaaagagaaaaacagcaaaggatgggcatggacatgcctgggtggcagtgatggggttacagtgggaagggcacctgccttcaaactgcagtcctgggatgcaggggtcagtcctaggaaactgcttcactcctcagccagctgcctccagcccagggaggggccaaggggggagggcgaggtgactcagggcctcagggcttcttgtgactcacccttggtctcaatcctagaatggggagtggagggagagaggggtttgtgtaaaagagagggagagggaatagtagaggacctcaaaatgcctaagaggaagggtccaggaggaagaagctgggggtctggactcctggttctgagggaggagggggtctgagggaggaggggctggggtctggactcctgggtctgaggaaggaggggatggggtctggactgctggtctgagagaggaggggcagggggtctggactcctggttctgagggaggaggggggctggggtctagactgctggtctgagagaggaggggctggatctggactcctaggtctgagggaggaggggctgaggcctggactcctgggtctgaaggaggaggatctggggtctggactcctgagtctgagggaggagggctggggcctggactgctggtctgagggaggaggtgctggggtctggacccctgggtctgagggaggaggggctgggtctcatacactggaagaactgattccagagtctccaggatttttccttggccttgtcccagctgcaccacctctgtcgcagccccatctccgggcctggaaagaacccaggtgcctcggggcccagcaggaaggggccagggacaaagagttgtttaactgggcaggctggtgaaggagagtgaagagggtgtctcaggcggaaaggtcattcatcgcccaaggcttgtgcagggaaaggcagggctgagccccgaggaagagatcctgaaagtcagaggtcagtggcggcaaatcctccaccgccatctctgggaccttggagcctggaagctccagggcttataaatactgtcacctagtgttcacttaggcaactgcagacactctccctgtccagcctggtttcttgccaacatagagcaaaacacctactgagtgccaggcactgctcaaggagttggcgatatgtaatgaacaaaaatggacaaaattcttgctcttgtggagtttccaggctaaaggagggagacctcgtgattccatcaatctcagtctcttctttgctctcagtcttcatttttctctctgtatatcattgtccttgttttttctttctttctctttttctttctttcttctttctctctctctttcttttttcttttctttctttctttcttctctctctctctttttaattaaaaaacatttttttggtcataaaatcagttcccactatgttgccaggctggtcgcgaactcctggtctcaagccatcctcctgcctcgtcctcctaaggtgctggaattacaagtgtgagccactgcgccttgtcttgcttctctgtttctatctcctggtcttagtctccaagtgcatgcttttctcctttctccttttttcttcatttctgcttttattttcttctttgtatctctgtgttccccgccagttaaaaatgtatgtatattatgttattacacagagacatacacccacactctatatatagtatatgcagatatgtagtatagtatatggcatagtatacagatgtatagtgtatacagatgtatatgatatacagatatctatatctcacaatatggaagtctagagacctcggtttaagcctcgatgtgaccactgactttattcattcattcattcattcattcaagacagagtctcgctctgtcacccaggctggagtgcagtggcacgatcttggctcactgcaacctccacctcctggatgcaagcgattctcctgcctcagactcccaagtagctggtactacaggcatgcaccaccacaccaggctaattttggtatttttagtagagacggggtttcaccatgctagccaggctgatcttgaacttctgacctcagatgatccacctgcctcagcctcccaaagggctgagattagagggatgagacaccacccccggcctaactttatttttgtatggaatatgttatacgtacagcctggtttagagacaaacctgagttcaaacctagttgccatccatagttgtgtgctctgtgaaacttgtaaaagagggattatgtttcctatgtgacagggctgcttgaggcttaggtgagagagaatgtctggagccctaacagcaggcctggtctatgttaaagtcttgtgatacattgtctcccaagttgcctgccagtgactcctcccttccctgcactggcaggtggcttctcccacgaaaaggaacagtatgttccttctccttcagtctatctggctcatgacttgctttgactaatagaatgtggcaaatatgacactgaaccagttccaggtccagatgttaaggaaactagaagcttctgcttttgtacccttagaactagaagaccaccatgctgtaaggaagcccaagctagtcacatggagaggccatgcagggagaatgaagctatcttggctaaagccccagtcctgtcctaacagaatgcaaccatgtgaatgacttcaggagagaccagcagaaatgcccagtcaagcctcaatcatgagattgtttattttaagacactaacttttggagcgggttgttacacaataaaaagtagattattatacccttatgttcatatctgcatgtttgaagttttccataataaaaaatatatatatatgggccaggcatggtggctcacgcctgtaattccagcactttgggaggctgaggcaggcagatcacttaaggccaggagttcaagtccagcctggccagcatggcgaaacctcatctctactaaaaatacaaaaaaaattagccaggcgtggtggtgggcacctgtaatcccagctactcaggaggctgaggcatgagaatcacttgaacctgggaggcagaagttgcaatgagccaagatcgtgccattgcactccagcctgggtgacagagtgagacttcaactaaaaaaaaaaaagtatatgcatatgtatgtatatgtgaatagataataaaataataaaatgtataatgcaaattgcactccatacactgcagctagcatcattttgctcctaatttttttgcctatgagcctttcttggtcagtctcagcttgggtctcaattttcttgtctgtctttctctattgctttctttctgtgtgtctattcctatcttggcgaaactcctcccatcactttcctttgcatttactttgctttatcacattggccttgttgctgattctcaaacataccaagcttttttctgcctctgggtcttagcattttctgttccctcttcctgaatgcttgcacctccactctcttcatggggcattccctcacttcattcagttctctgctcaaatatatatatgaattattatatatattataatagtatacaatatataatatcatataacatataataaaaataatacatatatcaataatatataaatatataatcatataatatataaatatattatatattatatttatatattatatataatttatatataatatctaataaataattataatttatataatatatataaatttatattatcataaacatttgtttatatttatattattataaatatttatatttataatattataaatatttatatttataatattataaatatttatatttataatattataaatatttatatttataatattataaatatttctttatatttctattattataaatacttatttatatttctattattataaacatataattatattcatattatttacattataaaatatatatttatattataaatatatatcattatatttatatttatatttatgtttatgttatttatatttataaatttatataaatttatattatttatatattcatatatatttatatataatttttgtttcctattttattaaatttttttgagacaaggtcttgctctgtcacccaggctggagtagagtggcacaatcatagctcactgcagcctcaacctcccaggctcaagtgattatcctgcatcagcctcctaagtagctgggactacaggtacaagccaccatgcctagcaaattaaaaaaaaattgctagaaaaggagtcttcctatgtttcccaggctggtcttgaactcctggactgaaataatcctccttcctcagcctcctgaagtactgagattacaggcatgagccacagtatccagccactctgctcaaatataatctctgccttaaccacctcttcaaaaacggtctcttccatctccctcaatcatcctacatcttatttcactgctttatattttatcatagaacttatgactatataaaatgatctcattttatctgtctcattgtttaaggacaggaacctggccatcctgtgttcagaacagtgcctggcacatagcagatgctcaatgaatatttgttgaaggaatgctcttgttcaatgatactgataggcgttttttgactctagcctcttgtcctgttccacactgttcaagatggcatttcttcatttccctgtcttttgtcctccgttagttgagttgctgtctgtggttctgagacccaatactgtggatctgtccttggtgctgacctggacttccacttccgcttaagcttgggagggtgggggaatcttgggaaggggcaaggttgtatgtaaaatccagacattaaataatcattatctgcattaccagaagaagagagatgtctgggttcccaagtgggtgtatgggtcactgtgagttaaataggtattagttctatctattatctaccttttcatatatacatacatattcatatatgtgtacatatatatttattatcgagaacttcaaacatatagaagtgaacagaagagtataataaatctccatgtatctatttaacaaataccaattcgtggtcaattgcatttcatctgtgcttccatttacttcctcacttcctatgttatttcagtgtaaaacctagaggtaataccatttaatcatatgtggcatttaaaattgttttctttttctttttagaggcagggtctcactctgtcacccaggctgagtgcagcggcccaatcatagctcactgcagcctcgacctcctgcccccaagagatcctcctgcatcagccttccaggtagctgggactacaggcgcacaccactgcacctagttacttttaaaatttttagtaaagacagggtctctctatgt[136 bp omitted]gtatggattaattcagttaaacctgtatacagacatgtgtgaccaccatctctatcaagctatctccatcaccacaagaggctctcttgtaaccctcccaactgatacaccagagataaccagtattctgaatccctatcaccaaagattaaaaagctctaatatggatgtccaaagacctgagctctagccatgtctttgcttttgacattaaaaaaaaaataggtctggcgcggtggctcaagcctgtaatcctagcactttgggaggcc[136 bp omitted]ctgaggca[149 bp omitted]agtgcataaaacatagtggtacattttggacaaatgatgtattgtgaacctccataaaatcaaaggcacaccaagagaaagtatttgcattccctagaatctccttatgtgctcctttatgatcgggaacccccaacctccagaggaaaccactaccctcacttagaagggactttaactcctcgtagaccataacactcacactctggtttctcagttcctccttctgcctccagccttttaatcctaaattgcccttgactctggaaaccaggcagcatgagaggccctctcaccatccacctccctggtctccctgcctccaatctcactccctcgggcctgtctcctgcatggccacagggagagcctcatatcacctggctttgaccatgcctcgccccttctctatatcagtccatgtatccccattggctgtaggagaaagttcagaaaatgttatccctatttgacattgtaagcccttcaggggcactgccacatcttcattcacatcttcttcacttaaaaaaaaatagagacagtgtcttactctgttgcccaggctggagtgcaatggagcgatcatagctcactgcaacctcaaatacctgggctcaagcaatcctcccacctcagcctctctagtaggtgagaccacaggcatgcaccatcatgccccactaatatttttagttttttgtagagataaggtctcaccatgttgcccaggttggtttcaaagtcctgggctcaagtgttccttctaccttggcctcccaaagtgcggggattacaggagtgagccactgcttctggctttcctcacactttaaacacaggtaggtactgaaaaatagtttttcaaagtggttgttctattttacacacatactacttggatgtgagaatcccagtagctccacatccttgctaata[131 bp omitted]cctcagcctcccatgtagctgggactacaggcacctgccaccacgcctggctaattttttgtatttttagtagagacaga[145 bp omitted]ttgctacattgcccaggctagtctcgcactcctgggctaaagcaatccttctgcctctgcctccaaaattgctgggattacaggtgtgagccactgtttccagcaggtgaagcttttattaggtgagtgcaaaagtaattgcgatttttgcattgttggaatttgccatttgatattggaatacattcttaaataaatgtggttatgttacacatcttttttttttttttttgagacagagtctcactctgtcacccaggctggagagcagtggcacgatctaggctcactgcaacctccgcctcccaggttcaggcgattctcctgcctcagcctcctgagtagctgggattataggtgtgcaccaccatgcctggctaatttttgtatttttagtagggacagcgtttcaccatgctggccaggcttgtctcaaactcctggcctcaagtgatctgcccaccttgacctcccaaagtgctgggattacagttgtgagccaccatacctggcctgttatacatccttgtaatgggcatttcttgctttatgtttttctgctaatgacttattacttgatgtttattttatgtttattttagactctggaaatgatattagacaaaaagcacattagagcgactttcttatttcttatttgagttcaaaatgggtcataaagcagagtttgttgaatcctgaagcacatatttttatactacaggaatcaacaaacttatttctcattggcaaaaatgtgttgattgtaatggttcctattttgattaataaagatg[138 bp omitted]atggtgaaagctccccctccccctggcccctgtcactattaaaaatacaaaaattacccggatgtggtggcatgcatctgtacagtcccagctactcaggaggctgggacaggagagttgcttgaacccaggaggtggaggttgcagtgagccgagatcgtgccactccagcactctagcctgggcagcagagtgagactctgtctaaaaaataaataaataaaatgaaatttatggtccaaaaccataattacttttgaaaggcatctccctctctgctaagcactcaggaaggcatctgggtcgcaatacccaagcagctacatagccgagtccacagtttcacttggaccccccatactatgagttctaaggcagtcggtgcacccctgttctacttagtgagagctgtcaagtataagcttttagaagtttttgaatcattctcatgacaaagaactgccaattgctcatgtatttcatctcacaggagtccttggccaccatgcctcagggataatcttctatctcagaagtacagtcatacactgcctaacaaccccttggccaacgacggactgcct[135 bp omitted]catggtgaaaccccgtctctactaaaaacacacacaaaaaattagctagacgcggtggctcatgcctgtaatcccagctactcaggaagctgtggcaggaaaattgcttgaacctgggaggcggagtttgcagtgaaccgagatcgtgccaatgcactccagcctgggtgaaagagcaagactctgtataagaaagaagaagaagaagaagaaagattactatgaagctgagcgattccttttttccccattcctcaggctgaaacctatttaccctgttcctcaggctgaaacctaggagtcatctcaagtactcctcaaccaatatatcagcaggtcctgtcttctccactaataaaacctattccttgcagcctgttaaggagaagctaaatttttaaaaaatctattcattttccaactccttgcactacctctgccatcatctcttgcctaggtatatcatctctgcctagactggggcagtagccacctcacaggtctagcttccattcttgccacagggaagcttttaaaatgtaaagcatgtacacaagagcacatgctgtaggattccattcatatgaagtttaaaaataagcaaaattgatctgtgatagaagttggagtcatggttatccttggggtgggaaactgactctgaagggctatgagggaggctctggggacatgggctggaaatattctacatcttgacctaggtggaggttattcaggtatgtacatatggaaaaattgcaatttatgcattttattgtatatattttatacctcaatgaaaatgttatatcatatattacatgtaattatatgtgcatataattatatacacatacaacatatatatacacacatacacacacacacatacacccttatatatgattatggcagccttctacttctccaacgcattcttttttttgtttttttgagacagagtctctgtgtgttgcccaggcttcaatgcaatggcatgatctcagctcactgcaacttttgcctcctgggttcaagtgattctcctgcctcagcctcccaagtagctgggactacaggtgcatgcccggctaatttttgtattttcagtagagacgggatttcaccatgttggccaggctagtcttgaactcctgacctcaggtgatccgcccaacccagcctcacaaagtgctgggattacaggcatgagccaccacgctggctccaacacattctgtgttagtcttggattaaccacagaaacagaaccagtagacaatctataatataagatttattgcaaagaattggcttatgtggcctggctaggcaggtcagaaagagcaagctggaatctcaggcatgggctgaagcagctgtccataggtgcagtttttttcttcctcagagaagcctcatctctgctcctaaggcctttcagctgatagagtcaggcccacccaaactgtctagaacaatctcccttcctcaaagtcaactgattatggactttaatcacatctacgaaataccctcacatcaacacactgattagtgtttgactgaataactggaactgtcacataggtaagctgacacatcaaactggccatcccaacttcagaccacatttgcaataaaatccaaaatctggctgggcatggtgactcacacctgtaatctcagcacattgggagactgaggcaggaggactgcttgagcccaggagtttgagactagcctgggcagcatagtgggggccccatctctatgaaaaatacaaaaattagcagggtgtggtggcacacacctatagtcccagctactagggaggctgaggtgggaggattgcttgagcctgggagattgaggccacggtgagctgattgtgccactgcactccagcctgggatagagcgagaccttgtctctaataaatacacaagcaaaatccaaagttcgctttggattgctagcccatcaaaaaggctagctccttgaaggtgggaatttttgccactttagttccctgctgcatgcccagcaactggaacagtgccttgcacatagtaggtgctcagtaaatgtgaaggatgaatgaagacatccagcttccccttgtatgtcaggatgtaaagacacctgaagcccttgtcacatggccttacaggagcataggagcggagtgtttctgaattgccccccttcccacaagtctacttgctgacatggagcgagaagacacgggagtctactcttgctatgcacttactctgaaaattgctctctcactgtgctttgggcatcttgtctgtaaaacaggaaggtgtcttagtcccttcaggctgctgtaacaaaataccatagactgtatggcttatacacaacagaaatttatgtctcatagctctggagtctgggaagtctgcaatcaatgcaccagcagattcgatggctggtgagaacccactttcttgcttataggcacctgctggctgtgttctcatgtggtggaaggggcaaggcagctctccagggcctcttttataagggcactaatcctattcatgggggctccaccctcatgatctcaccacctcccaaaggccccacctcccagtaatatcactttggtaattaggtttcaaaagatgaattttggggagacacaaacattcagacaatagcaggatgcaacttacttttttgcttctctcactgagttgctggaaagatcaagtggcaaaaagcatgtgaaagaacatggtcaagcatgtgcacagagaacatgctaaaggatcccatctctatgaagttcatgcagttatgaaagtgtcctgcactcatgaaagtgtcctgcactccttgtgctccttcctccctcagacctttgtccaggctgtctcctctacctagaatgcgcttcctcctgcttctttttgccagctactattgatcctttaggattttgctcaagggtgaattcctccaggaagtcttccctgatctttatagcttggagaatttcacctcgctgaactttgccttgtgtgtttttctgtgaagttaatcggcactcatgtgtttaggaggtggggttgcttagcagttcgtggggctgggaatctggtccctgaatccatactcactagatacacaagctcaaccaagtgcttttgcctctcagtttgttgacctgtgacttagggcttatgacaagtagcccatttacactgggccactgctgtgtcccaagtactaaatgttcatctcgttgaatcctcactgcaactactgtgaagtagttcttgtcatgttatagagtttattttcacctccaccttataggtgagaaaatattggcacagagagctcaagtaactcacccacagtctctgcaggctgaatggtggagctgggatttgaacccatgcagcttagctccagagcctggcttaagtaactcacccatggtctctgtaggctgaatgctggagctgggatttgaacccatgcagcttagctccagagcctggcttaagtaactcgctcatggtctctgcaggctgaatggtggagctgggatttgaacccatgcagcttagctccagagcctggcctactaactgttagggcatactgcttattgggcttctcatgatgacactaataaagacatcattgtatagctccctcctagagctgcgacaggctctggagggagagcacaggaagccgtgttatggggtgcctggtgcctggctggtgctcagtgagtaacagctgtgatcagaattgctcttcatcggggcacgacatggctgttttgccctccccggggatgctggtgactgtgtccagtttcttccagtactgttggccaggttgtggggcacaagggcgggagagatggaaggccagagggacaggagtgcaattcttactttaacatcattttccagtgagctatgtgataggggctgaagcagcaagaatgaggtgtgtgagccctgtccccagcatcctggaggggcggtctatgctgagagccccaccagcaggaggactgggaggagcagggccaggacctgtagtgctcggggaggggtggtggctgaagcactggtgaagggctgggtcatggatttcctgttgcagaggtacccctcacagcaggagccctggaggtcgatggctgtccaggggctggtggtgccctcggtggtgcaggagggccggtggcaggttctgatgtacacagggactgagaaattgcctggaggtgggcaaagcagtgaggaacggtcagaactgagggagacagctgcacctgaaccttcaccttggtagctagggccatgcctcggtcctcagacttgcttcaggttttcctcctaagaccagggccaggcctccctcagaccagggccatgcctcttccctcagaacagggtcgtgcctcctccctcagaccagggccatgcctcttccctcagaccaggggccatgcctcctcccccagaccagggttatgcctcctccctcagaccagggcatggcctccttcctcagagcagggccaggcttctccctcagaccagggtcttgcctcctccctcagaccagggtcatgcctcctccctcagaccagggtcatgcctcctccctcagaccagggtcatgcctcctccctcagaccagggccaaatcttctccctcagaccagggccaaatcttctccctcagaccagggtcaaaccttctccctcagaccagggtcatgcctcccacctcagagcagggccatgtctccctgttgggcctgtctggtatcactaccctcatggctgccctgcctccatatcccttgcccaggcccttccacccttccagccccttaccaactgtcattctgccattgccctggaagcaggcggtctggtcctggtgacactggactcgtcgggacctgccgatagcgcagtcatcctggtggaccccgatacaggcgtagcactcggcgccgctgagcgtcggcgggtcgggtgctggcaagagagcgtagatgcacactcaggcagtggtaccctggcacagtcgtgcgggctgcgcactgcgccagagcccgcgcctagcacgtctcgggggttgggatcctagcgcgccaagagcaggcgcccagcggaggccacgccttccccgaggctgccaggcctctcatcgtccctcccggagcccagccccgctctcccgcgcaccttggctcaggttggggagggcgtcatgagtcatgaggtgggcgttgcatttgtcagttgtgcagccgcgcaccaccgagtagtctggcggcagcgcgtccgcgttcgattgcgtctggcccgcaggaggcccggtccagcagcccttccgcaccagggtcaccggcgcgcgataccctgggggcgggatcggggctcgtgctctgcttcccgaaacccttctccctccagtctcagcgttcttcctcctccctctatcctttcactttcacctacacctcctcccctccctccttccctccttcctctcacccccagaccttttcccccgagttcttctcttcctccactcttcctccctgtgcgcctctcccaccttctcttccttgcttccccattgtttcctcccctcaccgctcgtccctcatccactttttcttttgtggggcggaggacggagcctcgctctgtcgccaggctggagtgcagtgacccgatttcggctcactgcaacctccgcttcccggattcaagcgattctcgtgcctcagcctcccgagtagctgggattacaggtgcccgccaccacgcccagctaactttttgtatatttagtagagacggggttttgccatgttggccaggctggtctcaaacttctgacctcgtgattcgccagcctctgcctcccaaagtgctagagttacaggcctgagccactgccccagccctcatccacccttttctttttcttcctcctcttcttcctctccctccccatctttctatctttatcttttcatcttctactcaattcccctccctttctgctcccctctcccccctttttcctccctaatctctcatccctgtcccccggctcccgctccttaccggtgtccagagacaggatagcctcaaagcactcatgaggacaggagatgctgggcagcttcatggccctgaggtcaaaggggccaaagtaggtgtgctcaaagctgtagcactgcagggcttgggaccctggggagagaggcgtggcagagtcagcagggccagtgtgagcctgtcccaggaactcagagctccacccagcaaatgacaggcacacgggcctggcccctctgctcccagggaagacacgccttgagagaccaggtgctgctattgcagctggtcacagctgtgtctgtctcatggcagagtaatgacctctctgcagctgacagtccagttttttccctccaggacactccaggtctccaccctcttccaggaagccctctccctagctatgacttagaataggaaggaaaagtgattcattcttgctctgcccatccttccccaagcttaactcacaaagtggacagcacagtaagagacccctgacaagaaacatgcactccaggacaggtagagtgaagtgtggtcctgtagtgccctgtaaacccatacatcagccccagcaacacacaaactgacataaacacacaataacaacacatacacaggttcatccaagtctcacaaatatacacagaatatcctgaatgcacccaggcagagttttacattctcacacaaaacaagtacgcatctggaccctgcaatataaacctccctaactaaggcacagcacttcacacatggaaaatcacacagacacaaagcgtatgtctgtgaggatgcttgtgcctgtatgataaccatatcaacacagagagggaccagatgcacagaaaatcatacccagagaggtcccaaatcacagaagcacaaataaaaccagaggccacaattatgcgatgtttagagatacaggaaaatgagatcacaaaaacatacagtttaaaatcatatatggaggccaggggtggtggctcatgcctataatcccagcactttgggaggctgaagcaggaggatcacctgaactcgggagttagagaccagtctgggcaacaggtgaaaccccgtttctactaaaaatacaaaaattagctgggcatggtggtgcacgcctgtggtcccagctactcaggagtctgaggcacgagaattgctggagcctgggaagcagaggttgcagtgagctgtgatcgcgccactgcactccagcctgggcggcgacagagggagactctgtctcaaaaaaaaaaaaaaaatcaaaatcacatatggatacaaaatgtatagacccatgtaacacagatacatggagagaaaaaaaaaaaaaaacacatcaaaaggcccaaacaattggtcaggcatggtggtgtccccctgcaggcccaactacttgggaggctgaagcaggagaattgcttgagccaggagtttgaggctgtagtgagccatggttgtgctactacaccttagtgtgggcaacagagtgagaccttatctctattttaaaaacaaccacaagaaaaaaggccagtctcattggctgatgtgagtggattgcttgagctcaggagtttgagaccagcctgggcaacatagtgaaaccccacctctacaaaatcatacaaaaattagccaggcgcagtggcacatgcctatagtcacagttactcaggaggctgaggtgggaggattgcttgggcccaggaggtcaagacttcagtgagctgtgattgtgccactgcactccagcctgggcgacagagcaagaccctgtctcaaaaaacaaaacaaaaaacaaaaactgagcatatatacatagagataaatataggcttacaaatcacagatacataaacacagacacagatacacaaaattacacacgcatctcttttacaaagaaagcaaactcagaaacagacccacaaacgcatttgttcagactaagactttaaaacctatacagagaaacacacacaagcacagagactcataggacatactgaacctggacacatacagaaatcaaactctctcccattaaggagcagaaacacacagatttggttgtgtgcaggaatagcctcctttctacatttctaattccctgtctttgtaaccacttccattctgaaatgagttatgttcctgtcctagcccacaatggggtagaggttgcctgaaggtgaagccagggtttctgccagtttcggaaagagtcctgagggctccctggaaatacctttgaattgggggttgggcaaggaagagaagaaaggctgggatggtgggaagagagacaccaggaaaaatgactgatgggagaagaacaaaggcagggaagagaaatgaaaatgacatagcctccaggctcctgcccaccaagacccaggagtccaggcccccagcctcctcctccctcagacccaggagttcaggcccccagccccctcctccctcagacccaggagatcaggcccccaacccctcctccctcagacccaggagtccaggcccccagtctctcctccctcagatctaggagtccaggccacctgccccttctcactactggattcagaagtttgcgtacctgtcaggcagagcgcagccccaaagaggcagagcagaatgactctggggacccccattgccattgctgagctgggccacctgggacagctcctcccgctgtgatgtgctgcctggctggttctccttactgagtcctaagcatcccggccacccagcctggccagtatttcttcgtcccaccctccctatgtgggcgggtctcttcctaggtaatcgtgatggaaacagggtgatcctcagttgctggagatctacacttctgggtctgagggaggagagaactagaagtctggaacccttaattttgaatgattggtgtcttgttggccttcttccttcacccctcccagcactctgctctaatctgagggtggcacatatggccttttgacttcccttccctccccctaccccaacacacaccacccacacagcttccaatcctgggatgtctccacacccaaagacacgttcatcgtcccatcatctaaaccttctctgaaccccatctccccactcatccacacaccctcagcctccagcaccttcctgtctcccagccctgatcaaactaggctgggctagcgtctgtctcccctaccgggctgtgaactcttcgggggcctccaggaatgtctgagataccgtatgactgaacgaatgaatcaatgaatgaagacacaaacagagaggcaccaagagacatacagggagagacagacacaaaagagaaacagagagagaggaagagagagagagagagtgtgccttcgaggaagcaattacacatgagatgcagaaagacagacacagcctgctgtgaacagatgtgactgtgtagtcacacagacaaacctagaggtgaagagggacaccccgatagacacgacatgcccccaggtgtttcagaaacatttattaaatgaatgaaatcaagaagatggagatacagcagacaaccagagggtcactgtcccccgaggacacaggcagacacatgtggatgctcagacactcagcaggtgaggaggtccagaggaggccccagcaggtggttggtgctgaggcagagaccccaggctagcacctcctggtttgtctcacttcttgctgcctggagatgctgcctgctggatcaggctagtggatactagccacagagtgggcaccagccatgtgcagacacccagagtctcagacccacatctggatggcagagtccacgtaacactggtgaccaaaagagccttaatggtcccctcagatcgactaaactttagacaggtttcttcctctcggccctggatcacgctttttgtaggacacttactttagaaaacttgtacagtcatccctcggtattgttttctatttctattttttttattgttttttggtttcaaaatattttttatccaaagttgactgaatgcgtggaggtagaacctgtggatgcagaaccccatagacacagagggccaaatataattgcaaattctttctctgctccccccgcaccccctctctttttctttttgagacggcgtctcactctgttgcccaggctggagtgcagtggcgtgatctcggctcactgcaagctccgcctcccaggttcacaccattcttctgcctcagcctcccgagtagctgggattacaggcatgtgccaccatgcctggctaatttttgtatttgtagtagagacagaatttcaccatgttggccaggctggtcttgaattcctgacctcaagtgatctgcccgcctcggcctcccaaattgctgggattacagacgtgagccactgtgcccggccttctctgcgcctttgaaatgtaggtaaatcttctcctggtctcttgccagcgttacaacccaggaatgtctttttcaaggacctgggaattatccctttgaaatcatcaagggagatagcacccctatcgcccagtctctgtgggagggtaggagcctcactttgataattgacaatcagcaaactcagatggcccaatcacagagaaaaacatttgcagactcaggaataactccatgtgatggacacatcccattgacagaataactccatgtgatggacacatcccattgacccacctcccccattgtcctccaatatttttccattaactcacctagggcttaaccaccctagcatatttgtttcagtggagttgagttcagtctctttccctattgcaatctccttgaataaagtctgccttgcctgtgcaatttttctttgacagcagccactatggacactcaccaaactatgtcctcccttactgtcatcttgccaaatccctcctcttcccatcaggcctcacttcccagaacctgttttgcatacaaattattcttccttcctgattctccagtttctgccccaggctctcagtgggggtctatccagaccggggcagggttgtgctcgggggtctctggagagtggagtctggccaggaaggaggatggtttttctgaagcccccgtggaaggtggaggcactgaaggtcttcacagcagttgtcagtttcagggattgaggcttacagggtaggcagaccagtctggtgaatgcatgagtatgtgagtgctgtgtgcacttttgattctggtatcattcaggtacttttggagactttgaagtgtcagctccctgtaccttttgggagcatccatctggctgtcttcatctgcctggtgtctgagtgttcacgagtctgttgaatgccttagaattctgaatgccttagaatgttctcaaggatcttctgttgcattccatcagtttccacgcatggttccatttccaatcatgtttgcaaacatctggcctctcaaaattttttttcatatttgattttcataagcagtttactaaatgtgggtaccttctagggtttgtggcccaaatagttgagaagtatttagtatttcttgccttattggaaatgattccattaatcaaacaagtcataattgtaatgcgttttaagatattccctaagtaatgtgggtcatcccttgcttccagtcctcatgttctgcataaatgttatttcacacattatcagaattgtgaattttcttttggaactctagtcatgaccttgtcaaaaattggatcatgcagattgtatgccaatatattcttttgttattttgttatttttattttttgagaccgagtctcactctgttgcccaagctggagtgcagtggcgccatcttggctcactggaacctccgcctcccaggttcaagtgattctcctgcctcagcctcccaagtagctgggatcacaggtgcctgccaccatgcctggctaatttttgtatttttagtaga[148 bp omitted]catcaatatctctttctttcaaatcagatcttaattttcttttacagttcagtagtatcaagtgtattcatgttttgtacaatcaatatccagaacttttcatcttgcaaaactgaaactctttacccatcaaacaactcccctttcttctatccctcctccccacaccccctggcaagcatcattctactttgtttctgtgaatttgactactctagatcagggatccccaacccccggggcctggtaccagtacctgttaggaacggggccgcacagcaggaggtgagcggtgggtgagggagggaagattcatctgtatttacagcctctccccattacttgtactaccacctgagctctgtctcctgtcagatcagtggcttagattctcatagcagcgtgaatcctattgtgaattgcgtatgcaagggatctaggttatgcattccttatgagattataatgcctgatgatctgtcactgtctcccatcacccctagaggggaccatctagtggcaggaaaacaagctcagtgggccaagcgtggtggctcatatctgtaatcctagcactttgggaggctgaagcaggaggatcacttgaggtcgggagttcaagatgagcctggtcaacatggtgaaaccccatctctactaaaaatataaaaattagctgggcatagtgggcacgcctgtaatcccagctactcaggaggctgaggcaagagaatccttgaacacggaaggcggagcttgtggtgagctgagatcacaccactgcagtccagcctgggcgacacagcaagacaccgtctcaacaaaacaaaacaaaacaaaacaaaacaaacccaacaagctcagggctctcactgattctacattatggtgagttatataattatttcatcatatattacaatgtaataataatagaaataaaacgcacaataaatgtaatgctcttgaatcatctgaaaccatcccccactccccaggtccatggaaaaattgtcttccacacaatcagtctctggtgctcaaaaggttgaggaccgctgctctagataactcatataagtgaagtcatatagtacttgtcctttagtgactggcttatttcacttagcataatgtcccgaaggtataaccatgttgtatgtagcatgtgtcagaatttccttccttttaaaggctgaacaatatcccattgtgtggatacaccgcattctatttattcattcatccttccatcaatggacactggggttgtttcgcctctgggctattgtgagtaatgctgttatgaatatggctgtacaaatatctgtttgggaccctgctttgaatttttttggttattatatcaaatcattttgaatgttgcacgctcttgtggaagtgcccctcacctcattttctttcttttcttttcttttctttttcttttttttttttggcagagtttcgctcttgttacccaggctggagtgcaatggtgtgatctcagctcactgcaacctccgtgtcccaggttcaagcgattctcctgcctcagcctcctgagtagtagctgaatttacaggcgcctgccaccacgcccagctaatttttgtgtttttagtagagatggggtttcaccattttggccaggctggtctcgaactcctgatctcaggtgatccgcctgcctcggcctcccagagttgggattacaggtgtgagccaccgcgcctggcccaccttctaattttcaaataatttgtgatagctgtgctcacctgtgttgttgcaggctaggctctcctgggaggcagattgtgaggctgagattagcatgcaggaccttgggatcaatagctgcataaaggaggcaaaggaaactggattttgagcagagggtgagattgggtcctgattcagtcaatccaagggttcagtgcaccccagggggaggtctggcactgggcttctgggttctgatcagctgaggcaatgcccaaggggctgacatcagaagcagctgtcagagtccttcattcctaaagagatcttggtggcaaatcacagcatccaccacattctactcatttctttgttttagtgtatttttctccatctccagtgtattttttccacctctttgaaataaacattaattacagaatcctttgagattaaacaaagttacctgatctggtcatttattcctcagttgaaaaaattgatgtgaaactacttttctgtctaccgttactgtcttttggaagttaaatgctcttttttttgagacagagtctcactctgttgcctaggctggagtgcagtggcgtgatcttgactcaccactgcctcccaggttcaagtgattcttatgtctcagcctccggagaggctgggattacaggtgtctgccaccacgcctggctaatttttgtatatttagtagagacggggtttcaccatgttggccaggctggtctcgaactcctgaccccaactgatccactggcctcagcctcccaaagcattgaggttacaggcgtgagccactgcacccagcctaactgctcttatttaaggtgaataatttttaagagtttaaatttaagggtttaatatttaaatattcacatctaaagagtttaatatttaaattaggtggctgggtacctggattgacgaaaagaacatgtaattaaagggttcgtttattctccatttttcctgtcttccagttatttcttgaattttcttttcttggcttacccaaaagtggaaggagtaaattcatggtctgttctgctcaataattaatggatctgtgctacattctgccaaaatagcagctgtggaaattttttccccttgcaactttgtttttctcaaaaattcattcaatgatccactttgtttcataatagctttccattttctggtcctgattattttttgtccttgatagacatcgaataaggttaatattttatcttagaattttagcatcttacaatactatgtaggcaacaaatcattaaattttcataagtttatttttatactgatgaaatttctaaagcaataataagcaactactataatagtataattaacagacttgcataatactctttaatttcaacccacacacattctttgtggatgattaatggtaaccggatattagtttgttgtgttattgttgttgttgttttgagacaagagtcttgccctgtcacccaggctggagtgcaacggcgtggtctcggctcactgcaacctccacctcccgggttcaagtgattctcctgcctcagcctcccgagtagctgggattacaggcgcccgccactacacccggctaatttttgcatttttagtagagacttggtttcaccacgttggcaggctggtctcgaactcctgacctcgtgatctgcccacctcagcctcccaaagtgctgggattacatgtgtgagccactgcacctgaccggatattattatacagtgatttgtgccaagtgaaaggacttgtagatttatttatttatttaagacagagcttcgttcttgtcacccaggctggagtgcaatggcgaaatcttggctcactgcaaccttcgcctcccgggttcaagcgattctcctgcctcagcctctgtaactgggattacaggcgactgccaccacgcccggctcattcactgggctaatttttggtatttttagtagagacagggtttcaccat[137 bp omitted]tctggtagagtaaataattagatgaaaatatgaactgcaatatgaaatactgaatacagacaatgtgctggcaccattagggactttaacaaaatgttctgcatatcaggtggaagagcagctcattgtttagaagcacagactattttaaatgacataaaatcaacacgtctttccatttcaaaaccaatgtctccttagtatatggaagtagaatggtagctaccaaccctcttggaacaagacactttactgccatctgctggaacatagttgcaataaattgtaaatcacttttgcaaccgtcaatagcatgcacaatacataataattttcaaaaagttgttttcaaaatagtaaagatgtctgtgatatgaatagcacctccttaggtgtagtgttcttgtgcagtgcccaacatgaacaactgcacatggtgacagtagaatcatggcatctgcaaaacaaaatccattttactttttcctctccaatctttatgccttttttttctttttcttgccttattgtataggctagaactcccagtacatgattgaatagaattaatgagagtaaacatgcttgtcttgctactgatgttatatagtcgtgtgttttttttagacagggtctttctctgttacccaggctggagtgcgctggcatcatcatgggtcactgcagcttcaacttgctgggctcaagtgatcctccctcctcagcctcttgagtagctgggaccacagttgcatgccactgtgcctggctaattttgctagtttctacccttcccttccgttccctcccctcccctcccctcccttcccctcccctcccctcccctcccttcccctcctctcccctttctttcccttcccttcctttctttccgtttttctttctttctttcttttttttggacagagtctcgctctgttgcccaggctggaatgcagcgatcttggctcactgcaacctctgcctcctgggttcaagtgattctcctgcctcagcttcccaagtaagctgggattacaggggcctgccaccacgcctggctaattctttgtacttttagtagagatgcggtttcaccacgttggccaggctggtcttgaactcctgaccttaggtgattcacctgcctcggcctcccaaaggactgggattacaggcgtgagccactgcgcccagcctaacagaaaaatattttttaaataatagtaaatatataccagaccacccacagcgtgatcaaacacctttctttggcagcatttgtgtagtttctaatacagctttaaaatatgttcataaagaattattaaatatcctttgtatttatattttatttagagcctggagaaggctctaaataaaaggtgagaggtgaatattttgagttaacttgatataagcaaggtttcacagattaactttgaaatataggatgacatggggctgggtgccatggcttatgcctgtaatcccagcatttgggaggttgaggcaggatgactatgacagcttgagcccaggagattgagggaaaaaaaaatggataacatggaatagttgagaaacgtgacatcatgaaaataaaggtgatttttctaaattttattgcaa[139 bp omitted]agggcgaaactctgtctctactaaaaatacaaaaattagcctgatgtggtggtgggcacctataatcccagctacctgggaggcaaaggcaggagaatggcttggacctggaaggcggaggttgcagtgagcagagatcacgccactgccctctagcctgggtgacaaagggagaaagaaagaaagaaagaaagaaggaaagagagaaagaaagagggaaggagagagggagggaggaaggaaggaagggagggagggagggaggaaggcaggcaggaagactcattgatcatccatatagcaattatgtggatcaaaattgtcaacatttgccatatttgcttattctatctctatcttctgtgtcagcctctggtgcataggaaaccacaagcaaaatgtaggggcttaaaacatcaagcattttacccctctccaaatcctgtgtgtctcttgggttgttcttctgatatgggctggcttgactgatttctgctgggctctgtcatgtgcttgtggtcagctggagggttgggtggtggctggatgacccagaatggtctcactcacaagactggctgtcaggcaggcctcagttctcctccaaatggctagcttgaactttatcacatgggagttgcaacgttccaaaggggagcaaaaaagagcaacccctaataagcaggtgcttttcatgcctttgcttatgttatgtttgctaatgtcccatgtcccattggccacagcaagtcaccagggtatcccagagtcagtgcagaaggacactaacaaaaggtgtggatagagggaggggaatgatttgtggttattttttctatctatctatctatctatctatctatctatctatctatcaatctatcatctatctatccatccatccagctatctatcatcattatcatctttatcatctattatttgtctattactgttgaaccattaaaagcaagttgcagacatcttttgcttcactcctaaatataaattctggcataggcaagggtctttctccaattcaattcttcccttcccttcttttcagactatttttaaagggctaaataacttgaaacttgatcgttcatctcacattcacacaataattgtgacagtgataaagaacatgcagggaagacctacaaggccaactaattaaaatatttaaaaacattcatttttacccacaaggaaatcgtaggtttgagccacaacatttaaccagatttcttggagctcaaaggcagttctgcagtcaaatttatactcttttaactacacgcaaattaagggacagatgatgcagacatttctaggaaaagagtggtaacttctaggtcatcaccatggaaatgggtggtaacttccgggtattgccatggcaatggtaaactgacatggcacactggcgggagtgtcttatggaaagctgcttccacccaggccctgttttagctggtcctcaattaggtctggtgtctgagccccacctccggaatcaagtcccacctccgacctcataaagatattaaggacactgtaagaataaattcctgccccattcaggagatgtcttgtgtaattacgttactatgaggtagctggctggtctccttgagaagcagttgcatatcaagtgctcaggatcagcctctgctgctagcagattgggtactcagtagcggcggtaacttgattagtttcagtgaaaggtagcccctgcatggtgccctcccacagtaatgagtttatgcaagatctggttgttaaaaagtctgggaactccaccgtctctctctcgctctctctcttgccatgtgacacacctgttcccccttcgtcttccaccatgattgtaagcttcctgaggcctcaccagaagcagatgctggcactatgctttttgtacagtctgcagaactgtgagccaaataaccttctttccttataaattacctagactccggcattcccttattgcaatgccaaacagactaacacacaggcatagctttcacccttgccaccatggccactctgttcatgagaccattgaaccagcatggggctggctgaggagatggactgacttactttcatgggatggatcatccctgttgttaagagctttctttgtggggattattgttgtatttatttgtgtatttatgtatttatttattgagacgctgtttcattctgttgcccaggctggagcgcagtggtgcaatcttggctcattgcaacctctgcctcccgggttcaagtgattctcctgcctcagcctcttgagtaggtgggattacaagtgcacaccaccaagcccggctaatttttgtatttttagcagagatggggtttcaccatgttggccaggctggtctcgaactcctgacctcaagtgatttgcctgcaacggcctcccaaagtgctgggattacaggcatgagccactgtgcccaaccaaggattatttttagtaggaattaggatgagacacatatatgcatgcattttgtatgtacgcccataaatgtatccacatacttcttcctagacctacttgcccctgagcttccagtctcattccttacaagatcctgaccaaacagaaagccatgggccatttcccaggagcccatgtatatctgcacattgggccacatctcactccaatttaagtgaaggggccaggtgtggtggctcagcctgtaatcccagcactttatgagtctcaggcgggacgatggcttgagcccaggagttcaaaatcaatctgggcaacatagggagaccccatctctacaaaacattcaaaacaaattagcaggtgtagtggtgcacacctgtagtcctagctactggggaggctgaaatgaaaaaatcacttgaacccaagagattgaggctgcagtgtgctatgatcctgccactgcactccagcctgggtaacagagaaagacctgtctctaaaacaaacaaacaaacaaatgaagtgaagatctccaatcacagctctgtacaccaggatttaccttcaccactgcctgtaggacccacctctgagtagtggtcccgtaatatgataatttaggttcagcttccaaaatacatcagtcacactgatccatctgtgagccagaccttttcttccttaatattctacaggaaaatcttcatatgatgtcatgaatgtgaattaaaggaacaacatagctgcaaccaaggtcagtgacatgagagtctgagctgtctgtgtgtgtaactcttttgtgccatctagatctcttacaatgaattaatactgtgcccaaatcgcactatgacttagtgggttagatacccaactcatgacaggtagttttagtcatatagatacttgatgtcccatggtcaaaatcacagactctattagtactcagcagctggttttcaaattgaaagcacttatatgctgcataataaatggacttacttcagaaccttacgggctgtaattttgcttttgtatcttgccagagactccacataacagcttcaaccattatggatagaggtgacaccatcaaagttgctgattcatgtggctcagggacagggagattgcatcgcaggctttacctgctgtagagctctcacctgctttgaaactcagcagccttcaagtttatctgaaaaatgagtcagaacaaaattccaggccagtcatgatgggtcacgcctgtaatctcagcactttgggaggccgaaagtggggggattgtttgaggccaggagtttgaggccagcctgggcaatatagtgagaacctatttctaaaaaaaaaaagaaagaaagaaaaaggagtttgagaccagcatgggcaacacacggagaccccgtctccacaaaaaatttaaaaactagctgtgcacggtggcatgtgcctgtagtcccagttactcgggaggctgaggtgggaggatctacttgagccagggaggtcaaggctgcagtgagctgtgatcatgccactgcactccagcctgggcaatagagcaagactctgtctaaaacaaaaacaaaaccaaaaaccagctataaaagacacctagaactattaaaaaaagagaaaaaaagaacactattctgaagtgtgatttatatatgtatcatataaatcatatatgttatatataaacacacatctatatatacccatctattatttttattttattttattttatttttgagacggagtttcactttgtcaccctggctggagtgcagtggcgcgatctcagctcactgcaacctctgcttcccgacttcaagcgattcccctgcctcagcctcctgagtagctgggactacaggtgtgcaccaccatgcctaatttttgtatttttagtagagatggagtttcaccatgttggccaggctggtctcgaactcctaacctcaagcgattcacccgccttggcctcccaaactgctgggattccaggtgtgagccaccacgccccactctatctatctatctatctatctatctatctatctatctatctatctacctatcatgtatctatcactttcaaatgtcaaagagccctaccaaattatgtgcctgtttatcagtttaggaagtgtgagttgtaataacttattctttaccttaagggagatactatggcatgtcccagatgattggacttctaaaatcttcactgatgtggtaagttagtgaacattcatgaggtttatctccctctttctgtcactcatttgcattactatggcttctacagtgattgccacttcctgatcaccaggtcaaattagcatgattttattggtggaatgaaccagtgctatgttcttcagaatgtaaagatgatcaaggcctctgtggactacaatatgacggagattaggagggttatcaggaacctggggcaagacagtgctgcagtccttaccatgcacacatgaatggcttttaattctcctaaatgtcagagatcaagtaaaatacatttgtcagatcattaagcacatactaaggaccaaaaactaggttggtcaactccagtaaagatgtcacatctgacatagcagctgaaattggagctgctatttgtttacatttaaagtagtcactatgaattagctttggccacataataagtgatacggtttggctgtgtccccacccaaatctcatcttgaattgtagctcccataattcccacatgttgtgggaggaacccggtgagagataactgaatcatgggggtggtttcccccataccgttctcatgatagtgaataagtattatcagagctgatggttttataaggggaaaccctttttgcttggctctcattctctttgctggctgccatgtaagatgtctctttgttctcttttgctcttctgctatgattgtgaggcctccccaggcatgtgtaactatgagtccattaaacctgtttttctttatcagttacccagtcttgggtatgtctttatcagcagcatgaaaacagacgaaaacaatcagtaaccccaaaactcagaggcttgaaattacgaatattatttctcacaattctgggggctttctgagcatttcttttgctctgggctggtttggctgcagctgcatagtatagtcaggcctcactcaaagttctaatggttggttggttattgtgggggagggggcatgagaatgacttggccttatgtttctcatcatccctcagtctagttcacgcttgcatgaacccatgggagctgggttcaaaatgcaacaagaaagcagtttccattcagtgagtgtttttcaaacctctatatgtcacatttactactgtctcaaagaaaatcaaatgcacattcccagattcaaggagtggagaaattgactccacctttgaagggaagagctgcaaagtcatgttgcaaagaatatacacacaggaatgggaagaatttgtgggattttttttcaatctaccacatccactagcttcagtcatgcaggttttttgcaggggccaagtgaaatgaatggaggtatgatagggacaaataatcctgcatcctctaaattttgatgatgatgcaatctctgcaattcctcccacagcacagtattgagtttcaagggtttccacttggctctttataccataaggactttatttattttttttttttttgagatggagtctcactctgtcaccaggctggagtgcagtggcgccatctcagctcactgcaatctctgcctcccaggttcaagctattcccctgcctcagcctcccaagtagctgggattacaggtgtgcaccaccacacgcaagtaatttttttattttagtagagatgaggtttcacctttttggccaggatggtctctatttcctgaccacatgatccacccgccttggcctcccaaagtgctgggattacaggcatgaactactgcgcccagcccataagtactcttagttcacaagttaggaagccactataatgagttctaccagaagatgagcatatctatcccaaatatatgttaaaggatagaggaaaacaaccatagggtgagttcatggacttactgaactcactgtgagatcagacttgggccaaacatggataagtaacaagcttgaaatcctatcacaaggatcttgagggtctctcctggaaacactcctcttagcttacattgcctacagggaggaccctgagaagaagtttctgtgctattattttatcagccggtacagttccagggaagcaggagagagggaaaagtatagtgtggtagggaaggagacaacacttgtatgaaggtcttactgagctggccactgcttgctatcaagtgtaattgattgtttaattttgtgttttaagaccacctagctgaggagaagaagggaggtgaattcatccactggttcatgaaatgtttgtcccagagactattaactccgctgtacttccaggtcgcgtgtgaatagttcaatgggttctgtaacgtctcatgcatcagcatcaacaggaaagccctggggcttgagacaagtagtgcccattgcaggcatgaggtcaggtttcgttgctgcttgtgcccatgtagagttgttctgagttcatgcagggatgttgctgcagcagtgaatcaagagaaacaagtttccagaggccccaggcacaggtgaggctgagaggatctgaagtgacacataagatgtgtctgaactctttcttaattcaactcttgcatgcaattatctgagcctggtgatgattagagtttaaattctaaactactgatgctgtatcattaatgactaattgtctattattaaaagtttctgtctcttcttgtcaattctttaagttatagctttctaggaaattgaccatttcatctgttttcaaatttattctaattcaaaaaatattttctattcttgtgtagtctttttctttcttaatattatttgtgcctgttctcttttttattcatcttttgaaataatctattttttaattatctcagaaatggatcacttcaaataagcagttgttggcatttagcctctattgcatcagtgttttctatttctttaacttgtgcttattgttgacctcaaccaactttctttgtatttattctattattctgtgttctaacttcaagttggacatagccttcattcttttcatttttcccttcttcttcttcttctttttttttttttttttttgagatggagtttgctcttgttgcccaggttggagcgtagtggcatgatctcagctcactgcaatctccacccccagggttcaagcgagtctcctgcctcagcctcccgaggggtctaggagattagtgattattagttctagcgggttacagtgaccggtagcacaggagggattggcttcctttttctgaaggtgaaccgggtcttttctgtcctttttctaagtagcttaaataacacatggtcaataggcacaattttcacaggcctctaactcatgacccactaatcccctagacccccgttggaaaaaaggagaacgtgtaaccctggagatcgatgggtcagggctaaacccccaagttgcctttttagtttgaggggaggtacacaggcactctcccaaaccagtgtttcaaactttttatgatgagccgaatctgccaacaccagagcttccaaaaaggacaaaagaacttgtttctccagctagcggaaagtgtagctcatttcctcaatgttactttctgttatgtatgtgagggaaccactatgggagactgatggccttgggaagctagagagttggtgcccactgatccagttcctgacccaattccagttcagaaggcccaaattagcaacttctgggtcctaaaaacttcaattattggacaatactgtgtagctagagaaggaaaagacttcaccattcctgtaggaaagctcgattgtctagggcacactccagctgtcactctacacacaaacccacacacttgtgtcacagtcacagattcattccagtcctgtcatacaccaagcactttcttctttttgacacatacacacagtctgtcatacaaagagaaacacacctgctgtgtcatgagcacacatgcagtcacgaagacataccctggccatttcatgtgcacagatgcacacacaccccattccctgtgtcacaagacatcccagccgtggcacgtgcactctcatacagacgcaacgtcaccattcgcacggtagggcacatccttggctctatcacgcacataatattgcacacaccccctacaccatgtctgtcaccaccacggacggtccatcacacgcggccagggagacgcctgacctcgttttgccccaccccctccctcaagtcttcatacccagccacactgtcgccttcttcggctgctcgcattcgcctcattgcttctcccacccttacccgcactgccgactggggcatgagtccgcaacgccctctgcgcctcgccctgcttcgatgtctccttccgaaactacacgcggaacccaagaatcactgggatgcgcaaagcggatcaggagcgcacgctcattcggcccagtgacctgtgggaattgtagtcccgggccggaaacgcaggagacgccagaaacccaagtttgggacggcgcgtcccaagggtttctggaagttgtaacctgtgctccgagtgcgtaggcgcaggaacccttcgggggaatccctttagcagggagcgtatattgaagagtgcgtgcggaggtgagagcaataaactgataacggaaacagatggcatacttcgttttcagttatcaaatttcaaaaactaaaaatgtagatggtacacaatattgttgagaatgtggggaaatgagagctttcacacgtagtgggtggaaatgactacagctcttttacagttttgtgtagtagcattcacgaagtgtgaaagcaaacccctaagcaaccagcatttttacatacaagaatctagcctacaaaaatgctggcatgaaagacaaagatgtgggtacagtaatgcttaccaaagccgtgtttgtaatactgaagaattcacattgtaatactgaagaacctcaatgttcgttttttgagacactgttagtctgtgctagccaatatgatagctatttgtggctatttaaaattaaatctattaaaattaaataaaattcgaaattcagtttcttacactagccatgtttcaaaggctcattagccaagacagctagtggctactgtattggacaagagggatataaacatttctaacatcacagaaagctacattgaacagtgctgggttaggtaataattcaacgttaaaaggaatgaattaaatctataactgacatgaaatgaagtagaagaatgtgttgaagtggaaagggcaaatggcagaattatatggatagcatgatcccatttctgtataaaatagctgtgtctttatacatacattcagtgtacagaaaaatctggaagaatacctgaaaatattaactttggtcatttctgtagatagggaatgagtagggggacactttcatttctgacattatttatcatcagttatttgaatatttaaaaactgcaacaattaactgaatgttgctaaatccaaataaatatttttattacttattttgaaagatttttggctgccttctactatctcagcgacgtactctttcttgaaatactgaactactttagcttaatagacctccctcatttctgttttatctcctcactgaaaagcattagaacatctctacagctataccactctgaatgctcccgatctggtccgaaaagcattagaacatggaattacttgagtgattaaaagtaaaacaataagaaattgattgtggcatcagaaaaagtgaaatcagttggatcaatttaaaatcccaacataagttttttttaaaacgtttttctttttactttgtaattacaaaagcaatgcatgtttattacatgaaatatgaatatagaacaagtgcaataacagaaaagatccctgtagcccatggagtggctgaaaatgatgattgctagtgggtattggtgtctttttgggcaatgaaaatgttctaaaattgattgtgatgatggttgcatagctctttgaataaactagaaactactgaattcggccaggcacggtggctcacacctgtaatcccagcactttgggagactgaggtgggcagatcacctgaggtcaggagttcaagaccagcatggccaacatggtgaaacccctgtctttactaaaaaatacaaaaattagccaggcgtgatggcaggtgcctgtaatcccagctaatcgggaggctgaggcaggagagtcgcttgaacccaggaggcggaggttgcagtgagctgagatcacgccattgaactccaacctgggcaacaagagcaaaactctgtctcaaagaaataaaaaagaatctactgaattgtacactttaaatgggtgagttttagagtatatgaattatatctcagtaaaagtattacagaaaagcaataatctcagtgagctgagatcacgccattgaactccaacctgggcaacaagagcaaaactctgtctcaaagaaataaaaaagaatctactgaattgtacactttaaatgggtgagttttagagtatatgaattatatctcagtaaaagtattacagaaaagcaataatctgtgttaactagttaaccacctggaaaaataaagtaacttccatccctcacacattaaaacaaataatgttcacgacatgtataacttaaaaatagactaccagagtgcttatcaaattacaaattgatgttattataattttggtctgtaggcttgacagccaaaacacaaattatgaagtaaatagttaataaattatagaaaatataaagtatgtttcagtaaacttccctgcctccctcaaatttaagtagcaaataaactaagggaaaatatttcagatacaacaaacagataataaatttaaaacaaatcaacatatagatgaatacaaaaatgtgtagaaataggtaaagaatatagactcttagaaggaaaaattgaaaatgaccaataaatacttgaatgcatatgtaagct[136 bp omitted]catggagaagccccatatctactaaaaatacaaaattagctgggcttggtggcgcatgtctgtagtcccagctacttgggaaggctgagggaggagaatcgcttgaacctgggaggtggaggttgcggtgagccaagatcgtgccattgctccagcctgggcaactagagcaaaactctgtctcaaaaaaaaaaaaaaaaaagaaagaaagaaaagaaaaaagaaaaagaaaataaaatgttatcattggtttaaggactgggaaatggtcaaaacaattgtaaattttaagaagatattcattcacaatacttttggtgggaggaatccacttacaacctttctgagagtaactttacataaatatttaagagaagcatctcttttaattcaggaatccatttctagaaatgtagtccaattcggcaaagtttccgacgtacacaaattagtagctcttctatgcaccaacagcgaccaagctgagaatcaaatccagaactcaacaacttttacaacatctgcaaaaataaaataagataaaatacttaggaatatacctaaccaaggaggtgaaagacctctacgaggaaacttcaaaacactgctaaaagaaatcatagatgacacaaacaaatggaaacacatcccatgctcatggatgggtagaatcaagattgtaaaaatgatcatactgccaaaagcaacctacaaattcaaagcaattcccatcaaaatactgccatcattcttcacataactagaaaaaacaaccctaaaattcatatggaaccaaaaaagagcccgcatagccaaagcaagacaaagcaatggaggcatcccattacctgatttcaaactataaggtcatagtcaccaaaacagcatagtactggtataaaaataggcacatcgaccaatggaacagaatagagaacccgtaaataaacccaaatacagtcaactgatcttcaacaaagcaaacaaaaacataaagtggagaaaggacgccctattcaacaaatggcactgggataattggctagccacatgtaggagaatgaaactggatcttcatctctcaccttatacaaaaatcaactgaagatggttaaggacttaaatctaagacctgaaactgtaaaaattctagaagataacattggaaaaagccttctagacattggcttaggcaaggattttgtgaccaagaacccaaaagcaaacgcaataaaaacaaagggcctgggacttaattaaactaaagagcttctgcgtggctaaaggaacagtcagcaaagtaaacagacaacccacagagcgggagaaaaatttcacaatctgtacatctgacaaaggactaatatccagaatctacaaagaactcaaattagcaagaaaaacaaacaatcccatcaaaaagtgcgctaaggacatgaatacacaattctcaaaagaaaatatacaaatggccaacaaacataagaaaaaatgctcaacatcactaatgatcagggaaatgcaaatcaaaaccacagtacaataccatcttactcctgaaagaatgtctataatggaaaaaaaaatagatgttgccgtggatgcggtgaacagggaacacttctacactgctggtgggaatgtaaactagtaaaaccgctatggaaaacagtgtggagattccttaaagaactaaaagtagaactaccatttgatccagcaatcccactactgggtatctagaggaaaataagtcattatacaaaaaagatactggtacacacatatttacagcagcagaattcacaattgcaaaaatgcttaacaacccaaatgtccatgaatcaatgagtggataaagaaactgtggtagatatatacagttgaatactactcagccataaaaaggaatgaattaatgcatttgcctggatttatttatttttccttttttttttaagatggagtttccctcttgttgcccaggctgtagtgcaatggcgctatcttggcttactgcaacctccacctcccaggttcaggcaattctcctgcctcagcctcctgaatggctaggattatagacacccaccagcgtgcccggctaattttcgtatttttagtagagacagggtttcatcatgttggccaggctggtcttgaattcttgacttcaggtgatccagctgcctcagcctcccaaagtgctgggattacaggtgtgaaccaccatgcccggcctggagactattattctaagtgaagcaactcaggaatggaaaatcaaacatcgtatattctcactcataagtgggagctaaggtgtgaggatgcaaaggcctaagaatgacacagtggactttggggacttgggggaaagggtggaaagggggtgagggataaaagactaaaaattgggtgccatgtacactgttcaggtgatgggtgcaccaaaatctcacaaatcaccactgaagaagttactcatgtaaccaaacaccacctgtttcccaaaaacctatggaaataaaaaattaaaaaaaaatcagacccccaaaatattcagagtagtacttgtgggagtcattgagcaagtaacatgggaagagaggaggctgcttccaccagtggttttggaggtggagcagatgctgatgataatgaagtcccagatgggaaacggggatgggtgccgaggaaagctcaaggaccctgcagatgaggactcagacccacgatactggatgaggcatccatgtcaccatgggagtcaaccagggtagtggcctcagctgaggcaggggaaaagctgggatccaagagctctagtcttctcttgataagcaagagagaccaggaggtgagagatggcagaggatgagagaggtgatatcagtgaccagaaagagcccctaaaaagtaacttccttttctttctgttagttttaatataaaatttcgctttaatatttttagacaattcttttttaaaaaagtatttatatccaaaggttcttaccacaccaaccacagccccaatctttttgccctaacctcagaatcagttagttgtctcctttaaaacctttctctctctcacacacccacacacacacacacgcaaacacacaggagagagagagagggaatatatagtattgtttttggagtatgagtgtgtgcttcagaataaatggtttcatactctataaaaaatgagattcaaattttataatccatcaagttttattggaacacagccatgctggattgcttgtgcattgtttatggccgcctttgcactgccataagtctccacggtcacaatatccactcactaccacttattgttgtctttcaacagcggcatataaaatctgtaacacagttcatctcacacctaataaaacagactcacacaggcataaatttagaaaacatcccatgaacataaacaggtccacgcagggtcccagacaccgaatcgaactaagaaactccctcacagcaagacacacccatctgttcaattgccagacactgttccaggcgctcatacccaggtaaactggtagtgtcgcgcaggtcatttccagcgaacttaccccggattcccttgctcgctcacgtctaagtccccagacaccccagtcccatcttcgcctgttctagactccagaatgcgttccttagcgaaagctgagaaccttttaattcgctctcagtcaacaccaaagaccctcaagcaaaagcaagagctcccgggcgtcttcgaaaaaagcgcctttgacaggtgaagccaagttgcatgctgggagcatccctgctgtccaggtttcaacttccggagactctgccgctgtggactacatttcccagaagtctccggggcacaggccttttaggggcggggcgagcttgcctgccagaagctcctctcccagcctgcgagcatttccaggctcttgtttcccatcagcctctgggtccaaactaaccacaggtctctgggtccttttccggtgtccttaaggttcttggactctgcatggtgagttggtcgtgtctgtagaagtaatcagcccgggtgaagctgggagggctcggctggctttactggggcccgactggaaccggcagtgagggtgggggtggcatcgggggtgctggaggtggggagggctgggtcacggacagagcgtgtcgtgtccggatcctcaagcctgtgtgcacgcgagcagccgagggacagtgtgtctcagacggcgtggcagggacggggcgtgtccccacggaggtgggtgcagttgtgaatgtgtgacgggctgacagggtgcgtggccgtatttgtaaatgtgatttgctttgaccaaatgctctaggttccctttagcctgtcttcgggcctgccacaattaaatgaccgcaagaaagaagtctatgctaagccccataatgaacgtttcaagcaagaaggatgagaattttagatctggaagtgtccgcgggacaggatcttgtcaagacctgatggggaagttctagaggtgggattcctagaagaggggcctctaggagctctttggtggtgagctacatgtttcagagccattgcaagcagacctctgtccccaagaattgccctcaacacagagacagactctagcctcccttttcattccgtttggttttgtgtggatgaaggcagaagtggccccagagggtgttttgctcttctttttcttttttaattaagtctgtgacgcgctagaaatgctgatgtctcatgttactgttttttcccccagtgctgccaggttgccagatttctaagaaggagtttgaagaggagaaaaggatttttgcatgtttagaaatcaaggttcaggtgaggttttttatacatactttttaaatacatacacatacaattacctttgcttctaggtcatgagaacattttctttccttggcctgaaatatcttgactgggttttcccagttacatgacccgccatgctggtacatatttcctcccagtggccccctattgttcttctccacaattcttacccacctgttcatatggcaaattgttcaaatacttcagtgcattatgatgcactgaagagttatagaaaggcacctcttgtagattgctattagagcattattttatactatgattatttgaagagattagtaattaggtggtgttatataaacattattttttatcttttctgtagtcataattaaaatttttttttaactttttttagagacaaggtctcactctgttgcccaggctgagtgcagtagtatagtcatagctcagtgcaaccttgaagtcctgggctcaggtgttcctctggccttggcgtcccaaagtgctgggactgcaggtgtgagccaccatgcctggcccatagtcatgatgcttaaagaaaggcaaggtataagggattttaagtaagggaatgtttctggcagtaaatgacaatgttgtctgctttgtgaggcttttaggggtggaaatatgattgagctttgaacatagggatttgtaatttgcaccaacaagagtggggactttcagataatctttagatagaaatctgtaacatttccaagcatgacttgtttgaagtccagctttctgtggcatgta[136 bp omitted]cggtgaaaccccgtctccactaaaaatacaaaaaattagctgggcgtagtggtaggcgcctgtagtcccagctactcgggaggctgaggcaggagaatggcgtgaacccgggcggtggaggttgcagtgagccaagattgcaccactgcactccagcctgggtgacagagagagactccatctcgaaaaaacagcaacaacaaaaaaattaaggctctggatccaaagtatctgaattcaaatcctggctctgcctgttggtagctgtgtgtgcttagacaattgattcaggccctctgtgccacatctataaaatagggacaggatagtacctacctaatggagttgatatgatgtaagatgagatattatatgtaaagcttcgtagagcagtgtcatccccatgatatgggcttactgaatattgagttgctattattgggctcttctagattatttcccataaactttttatagattagagtaacagaagtatgaagttgattgtgacgggtgcttgcaaattaactaaaaaagtgggggctgggcacggtggctcacacctgtaatcccagcactttgggagtc[135 bp omitted]gaggcaggagaattgcttgaacccagcaggcggaggttgtagtgtgccgagatcgcgccactgcactccagcctgggtaacagagcaagactgtctcacacacagacacgaaaaagtgaccacatgctcaaatgatctaggacaggaacactttttttgtttgtttgtttaaacaggttcttggccttttgcctaggctggagtgcagtggcatgatcatggctcactgtagccttggcctcctaggctcaagcgatcctcccacctcaggctcccgagtacctgggactacaggtacgtgccacaaagcctgaccagtttttgttgtattttttatagagagggggttttgctatgttgcccagcctggtctctaactcctggactcaagtgatctgcctgcctcgggctcctcaagtgctaggattacaggcgtgagccactgtgcccagccttacgacaggaagtcttaacctgaggtcttcttgttccattgacgagcttccaggtgaccaaaatcccttgaaattgagactaaatttttgtaaatatgtgtaaatgtgtttttttaagtgggcaaagtgtctataatttcatgagattatcaaaagtgaccatgacccaaaaagatctagctccattgttctggaaaaaagactgtaattgccgggaaagagcttgaaaaatattagtgtccagctgggctcagtggcttatgcctgtaatcccaacgctttgggaggccgaggcgggtggatcacttgaggtcaggagttcgagaccaacctgaccaatatggtgaaatcccatctgtactaaaattacaaaaattagccgggcgtggtggcgtgcacctgtagacccagctattcaataggctgaggcaggagaattggttgaacctgggagacagaggttgcagtgagccaagattgcaccactgcactccagcctgagtgacagagcaagactccatctaaaaaaaaaaaaaaaaaaaaaaaaaaattagtgtccaatagaatggaaatagtcaagtaaattgcagtatgtctagtgatggaatgatatgcacctaataaaaattaagtttataaagagtcaaaggaaggaaaaatataaatgatataattttaagcaatcattatagttatgaacaaaagtgctcaagaatattgtgttatgtgtcaatcccatctgataagacacggttttggaagacatatttcaagaattacattaaaatgttactttaattggtcattcactgaagaagtggaaaggtgcagccgtacttacagagtatctactctataccaaatactgttttgtttatgcacatttattttcttcctcagactttgaaggtggtttatctcatttgtgttgatttacaggagaatcttgacagtgaatgtgtctcattacattgaataacagctacaggatgttcgagagctggtaggtgtaaattgtttcaggcccactgattttcagtgttggccccgtttgttcagttttcttaatgactggaatatattcctcctgtcactcagttttttacatttggaaatgtctttatagttccaattatggaattaatgcaggcttggtccaaaaaaaaaactcagcggtccaggagacatatagagaaggaagctaaaaattgcatcctctagagttaatcatttttaatgttttggtgttttttttctttttcttttttgagatagtttctcattctgtcacccaggttggagtgcagtggtgcaatgtcagctcactgcaacctccacctcccaggctcaagcgatcctcccacctcagagggaaggtagctgggaccacaggtgtgtgccaccatgcccagctaatttttcatgtttttgatagagatggggtttcaccatgttgcccaggctggtcttgaactcctgagctcaagcaatccgcctcctttggccttccaaagtgctggaattacaggcgtgagccaccacacccagcactttggaatatttttatttaaatcctttttcctttgagcctatgggtctgttttttttttctttttttctgcagaataaaattatagtaattggtgatgtaaatgaattgaagactctttagttcttagtttgaaaaaaaaatccaacccagttctaggttttatgttaatcttgaatatttagggagaagagggaagtactagtgattcccttatttgaaaaccttcaaatatttacaacttctgggattatagaaatgtcatttaaaaatgaattaccaggcaaaaaagagttttagaattagattattttaaaggttacctctacagacaatggcaataatctccaatatacagccatcttacaaaaaatacattttacagataatatttccaaggacaggtgtaaataccaggaggtagaataagaaggttcttgttgtaaatgtttaagtaaaccaccaatttgtacagaagactgagcctttggttaagttctcagctttatacctaatcaggttgtattttctgatgcagcttaatgatgctgaatctctatgtaacttctgggaggaaggggtattttcctctatatgtttctgagaacctgttttgctcacattgttatttaggaagaatagcagactcaaggttgacctgtgaaatttgagttcacgttataagaaagcaggtctgagaaagacacattttactgtgagcaaaatagagtagccttaagtttctttggcataacaggataagggacagtaacattcttcattttcaataataatgatgaaaatgtggccaagcctggtggcttgcacctgtaatcccagcactttgggaggtcaaggcaggaggattccttgagctcaggagttcgagaccagcctggacaacacagtgagaccctttctttacaaacaattttaaagaagaatcattagtcgggcaaggtggcgtgcacctgtggttctagctactggggatggaggctgaggtaggaggatcacttgagcccaggaggttgaggctgcagtgagctgtgtttgtgtcactacactccagcctaggcaacagagcaagaccctgtctctgaaaaaaaaaaaaaaaaaaaaagacaacttataaacaattatcatataccattcagtattttgtatggatttcttacttactcttctatggtagacactgttctcacccgtcttactgatgaggaaacagaggtattgagaaatggataactatcaagctcaaattcacatcctaaagctctcacaccagaacttttatcttaatttcaatagaatatgcctcccacattatgttagttacaaaccggcctgcctaaggaattgatcatgcatgtctttcttcatcaattaatatgaaccaacaccatcataactaatgaggatatggtgggccataatttattaaaccttttgcttactattacgtagtttctcatttttggttaccagaaattatttttggttgagtacccttgtgtattcatcttg[136 bp omitted]ctgcctcagcctcctgagtagctgggactacaggtgcccgccaccaca[136 bp omitted]gcccttctttacctatttcttaaggatacatttctagaagtgaagttttgggtaaagaatttgccccaaatgcctgaccctgtgatacttgtacttagcgggtaatacagtgtttggaagacatagttgttaccttggagaccaaatatgccttggggtaagcataaggcagccagcagtcagcaacaaaggccagtaggcaatccaggggacctgctttaggaactcataggaaggcagttataagcaataccgttgaaccatgatcaagcatttggaggcaaatggaatttattctgtaaggtttatactttatagtttttattctactaatgttggttgcaaagtgagcctaataggatcaggtgattcagttatctggattcagttatctggagagtaccatgtctaagacaggttcagatacaaaataaatccatcagtcaagataagaaaagtagaatcaaaacctcattaatggaaggggaacaaaaaaataaataaaacctcccctcaaaaaatgaaaaaaaaggatgaaattcctcaacttaggccatgaatatattaatatcatttcattaatattattccattagtattattccattaatatatacatggcataacttggggaatttcatcctttttttttctaggcaagacataggcatatgtagaaattatacagttcatgtaatgtatggccatggttacaatgattgtgtggattacctaaacagaaaacattatgatcataatgaaaagataaatgttattaatatatatagatatataattttattttttattttttattttatttatttatttttttcgagatggagtcttgctctgtcacccaggctggagtgcagcagcgcgatctcggctcactgccagctctgcctcccgggttcacgccattctcctgcctcagcctcctgagtagctgggactacaggcgcctgcca[131 bp omitted]cacctcacctggcctgtttctttcttgagatgtataactttctaaacattttttcatctattgatgtgattgtcagtctttctgtattgatatatatgtattttataaatgtaatcataagtctcataacctcctttttctattgagtatatcttgattatttccctaagttagcatgtactcattgcatgatgttctgcgtcatgaatattctgatatatgcattagaaagtcagctttttgggttcctgatgaattccttatacagcctgtccagctcccatgttttgaccaacttccttcagtcctgagcccatgaaggacgttctagcttggaccatgacaggtattcctgagaggtaggaatggaaggaggatgatctgatttcctgggcaggactgaattgtcgaatcccaggtccagattcacatcctcagaaccagacactgccagaaacctccctgctgaagacctttggggtttaggtgaaagtttgaattccataaatggtgcgtggggtgtgtagcagaagcaggcatggagaagataagatcttctattagtgtaagtcaggatgggatcactgaggcacacctggtttaacgcttcgttttccctccccagttctggcttttctggattctgtgcttcaccaatagaggaatcccatggagcattaattagttcttgcaattccagaaccatgactgatgtaagttggtatttttctctccatgaaatactgtgatttttagggcgtgtgaatcttttcattaattttccttagacctatagaacttctccatagacccaagttttccacagagataaggactttggggttgcttggtctcaacctcagtttatgtgaagctgcatgtgttgggaggcgcttcagattagagagaggggagttaagtggttcttcccaggaatttcctaagagatgaagaccagtggtctttggagtcaccaaaggactccaccaccagtggattttgaaccagttgactttgaagtcattttgtcgtcaaccaggatgtgtaggccatgagtgacatttgtgtcatgtgcaatatcctatatcagtatcctcatgtgtcttgtatcagtactctctaactcagggacaagtgaagtactaagcgaggggtagttgatagtaacagataagatgatgcctaaggtctagatgataatatatttccacgatcaagaaaatctacagaaattttgttcagcctaaatgtacagatataattgagtgactaagctcatatattggaggataaaatgaattgcaacaaataaaaatactgtttattcatcataagaaaaaatgcttatgatgtaatctaacagtgatgtatttgagtcttgatagtccctaatttaatgggaatcatttttataaaataaagattttgtagtacatttggaaaaaagttttcatgttttcctatttctttctttctttttgagacagaatcttgctctgtcacccaggctggagtgcagtggcacaatctcggctcactgcaacttctccctcccaggttcaagcgattctcctgccttagcctcccaagtagctgggattacaggcatctgccaccacacctggctaatttttgtattgttagtagagatggggtttcacatgttggccaggctggtctcgaactcctgacctcaagtgatttgcctgcctcagcctcccaaagtgcttgggattacgggcatgaaccattgcacctggccttgtttttatttcttaaaggggaaagatggtgagcaattcacttttacaaagaatttatgaggaaggcacatagcacattgtaaatctgcatgatgtatacgcaggcactttttatataacagagaagaaactgagatttttaaaatatattaccagacagatctggatagctgagttatctcacagtatccgggaagttttttctgctataacaagattctcgtagaacatgttgacatcctgctttagtcacagattttcttgctttttcctacctatatcagaggctttcagcctactcgattgttatatttctccccctctttgtagttcatcctttgtaccctcttttttcctcttggaaatgttttctttaatttcacaagtaatacatgggtttttggttttaggggttggtgacattcagggatgtggccatcgacttctctcaggaggagtgggaatgcctggaccctgctcagagggacttgtacgtggatgtaatgttggagaactatagtaacttggtgtcactgggtaaggtcatctgcctgaaataatttagagtctcctctttgcatcatcagttttctgcactggaaattacagggctatctttgaagaaaccaggtgaatttcttctcccccttcccaagggcatgcttttatacttgctgggttagaaatgggtttgttaaacacgttgatcttccccatccctcagtgagctttacaccattctcgggccctccctgcaatcacctctctcctttaatggccaaggggctggatttgcattatagaacatttatttcataactatggcaaagaaaccagatttcataaattctgcaaatattatattgaatatctactcctggccagccttgtgctgagcactgtcaattgaatcatgaacaagctttgataacttgcccattttcgtgcagtttactttgtagtaaagcagaaacatcaaataagtaaatttataaatagataaatagtatgtaatgaagcaaattctttggaaaaggtaaacagcataagggaatagaaaatgatgaggactgacagggctaatttaggtaagacagtcggggaacgctttcttgaacagagatgtggagcctgggatctctatgtgaatatctggcggaggaacagatcagtcacagtgaacagcaaatgcaaagaccctgttgttggaaaggaactttaccagaactctagagtagagttattaaaggaacatgtactaagaaattaggccagggagataggaaggggccagataatacattgttttgttgttcttgtttgtggaatttggattgtttagtctctttcagtctgaaacagttcacatgtctttccttgacttgcgtatatgtctgtgatgcttttgaagattacaggccagctattttgtatagtgttcctgaatgtgggtttgtctgctatttcttcatgattagatttagaatatggatctttggcaggattatcacagaattgatgctgcgttcttctccctgcattttgttgggtggtatgattaatttatcattactcatgttattcactctgagtacttgattaaggtagcgtctgctggcttcctccttgtgcagttgccctttttcccttccacaactattttgtggggaggaactttgaaactattaaatattgtggaactgggcacagtggtggctcacacctgtaatcccagcactttgggaagctgagacggttggatcacttgaggccaggagttcgagaccagcatgggcagcatggcaaaaccccatctctacaaaaaatacaaaaatatttgctgggctgtggtggtgcgctcctttagtcccagcaactggggaggctgaggtggctggattgcttgaacctaagaggttgaggctgcagtgagctgagattgtgtcaccacactccagcctgggtgacacacaagaccctacctcaataaataaataaatattgtgttcctctttaaactttccatttattcatatgttcgctttctagtcaatgggctatattctgttttttttctgttatttattttgaagctcaaagtgttggagcttgtccagatttagtcagtgggaatcctttcatgatatggctttttggcacatctccgtcactctttgagtacctcctggttttctgataaacaaggtgttagaggttcatcttgtatgaaatttcccttgtctagttttacaatcagctattgctttgaagtgcctggttactttcacacagatttatagttattattttatgcatttgtcttttaaatcaataaatcaaaagtacaataatactaacttttatatttactcatgtagttacctttaccaatgttctttatttctccttatggcttctaattactgtttagtgtcctttcactttagtctgaaacactcttgtctaacatttcttctagagtaggtctactggtaatcacctccttcagcttttgttttttctggaaatgccttaatttcacctttattcttaaaggacagtttttgctggtatagaattcttggttgacagttttttttttcttttggacttttcaatataccatcctgttactttctgttctctgtggtttctgatgagaaattagctgttaatcttgttgcagattcttgtatgtggtaggctgctgctttcttcctgtgttctgaagtctttttgtctttgggtttccataatttgacaataatgtgtctagatatgaatctctttatcatgtctgaagttgttgagcctcttggatgtgtgtattcctgccttttgtcagattttggaagttttcagacattttttcttcaaatttttttctctacttttgtctctcttctttttctgggactcatatgatgtgtatgttggtgtgcttgatggtatcccattgatccctcaggctctcttcactgttcattattcctttttctttttgcttctctagtgcaataatttcaaatgactcattttcaagtttgctgagtctttcttctgctgaatccactattgaaattttcatttcagttactttactccagaatttgtttggttccttttttttataatttctatccttttattgatattttcattttgttcatacattcttttcctgatttcctttagctcttggtccatggtttctgtagctcattgagcatatttggatagttcatttaatgtctgggcttcctcaggaatggtttctgtcagattcttttttttcctttgaacgggccccatattttcctgtttcactgtatgctttgtaattttttttgttaaaactgggcattttgagtattataatgtggtacctctggagattcaattttcccattcctcaggcatagctgatttctgcttgttgagggctggagctgtcagattttttcaaactctttttgcaaattgtatattccttattgtatgtggtcactgaaatttctgttccatcatctctacagtcagttagtaccagacaaagatttacttaaatatctggctgtaaaaaggggaggaaaaaaaggtccattagccctttaaatcttccaatagatacttctggggaaagctgctgtggctgatggggctaaaatcaaggcagttatctgtgctggtccctcaaggtaacacaaaacccaccaaactgcacaaccctgaattttttggaagacaaggtcacgctgcccacccaggtcccaaccggctgttccaggaatacaggctgctctccccacagctgtggtggagctgaggagtgaaggaagtgattagttggtacacagcattccaggcacataggcctgtcatcccatagcattggctggactgagaaatgggggatggtggcttgcacgagccactctttcacctaagaatagtagcctctttattcatccagcactccccttgttgttatggaagtgcctgataagattccagaattaagagtttgtggatgccaatctctctctctcttttttttttttgagatggagtcttgctctgtcacccaggctggagtgcagtggtgtgatctcggctcactgcaagctctgcctcccaggttcacaccattctcctgcctcagcctcctgagtagctgggactacaggcgcctgccaccacgcccggctaattttttttctccttttttttttttattttttagtagagatgaggtttcaccgtgttagccaggatggtctcaatctcctgacctcgtgatccacccacctcggcctcccaaaatgctaggattacaggtgtggcccaccgcacctggccaatgacaatctgtctttccagctcaattgttgctttgatggaggtaccagcccttagagcttcctatttcatcattttgtgtgacatcactcctacatattcatttaatgtcactattgatatggttagatttcagtttactatcttgctattttttgtttcactagttctttcttttgtttccaccttcttggattcatcaagtattttttagtattccattttatctcatctgttatcttttgctgtattatttgtatttacttttgggattacaatatgcatccttaatttagcatggtctacttgaaattaataacatactactttgttgtataatgtaagaattttactaatctgtaaacttcattcagcctgaaaagcttcctttagcatttcttgtgttatatggctactagcagctaattttatcttttttttttttttttttgagacagtctcactgtgtcacccaggctggagtgcagtgccatgatttcagctcaccgcagcctctgcctcccaggttcaagcaattctcgtgcctcagcctccaaaatagctgggattacagtcgtgtgccactatgcctgactagtttttgtatttttagtagacacaaggtttcactgtgttggccaggctggttttgatttcctgacctcaggtgatccacctgccttggcctcccaaagtgctgggattacaggcatgagccactgcacccagccttcatctttcttatttttgaaggatatttttaccagatatgaatttcccaactgatatattttttcttttagttagcttcaaaaatgttccattatcttctgaactctattgtatataatgattagacagctatgattcttattgttcattttatatatactttattctctgttattaagttttttctttatttttggtctgtaataatctgactataaagttctagatatggttcctttacatttatcatgcttcactttcccttacctttgatcagtgggttgatttttttattgaatttggagaaatttcaaccattgtatcttcaaatacttttttctgcttctttagtacttttcctcctcctaagactccaattatatgtgtgttagaccacttatatggtgccaccagtcacggaggtgcaacccccagtctttttactctttgtacttcagtttggtaatacctatttacctgtcttgaagtcactgttttttttttctttgatagtgtccaattattgttaagcctatccaataaagatttcattccacctacattttatagttatagaatttacatttggttttgtgggtctgcttttattgactgtattttctctaaatcttgtgtcaaattttcctgcttctttaccggtcttacaatttctcattgtatactggccattgtagatgccatgttgtagtgacttggggattttattatcttcctaatagttaaactgttcaggcaagcagttaaattaatagcagatcacaatgatctttttaagagttgatttttgaaggcaggtacagtttggttttatccttagtcctggacataattcttactctaggtagggcagtggttctcaaactgtggactgaagacccctgggagttcccaagaacctttcagtgggccaaacctttcacaaagtgaaaaatattctcataacaatactgagaggtttgcctttttcactgtggtgacacttccactggtggtgtagaagccatggtgaatcttctctgctttagcatgagcaaaggcagaggcaccaaatagtactagtaatcatcatattctttacctccacacacaaagaaaatgtgttaagaaaaaacccattttcacttaagaacatcttgaagaagcagtattcattttattaaatctcaacccttgattatatatacatttaaaaaatattctatgtaatgaaatgggaagtatccattaaggtcttctgctgtataccaaagtatgatggttgccttgaagaaaaccacttgtacagttgtttaagttgtgagttaaaggccaggctctgtggctgatgcccgtaatcccagcattttgggaggccaaggcggacagatcacaaggttaagagatcgagaccatcctggccaacatggtgaaaccccatctctactaaaaatacaaaaattagctgagcatggtggcacgcgcctgtagtcccagctactcgggaggctgaggcaggagaatcgcttgaacccgagaggcggaggttgcagtgagccaagatcgtgccactgcattccagcctggtgacaaagtgagactacgtccccacccccaaaaaaattgtgagttaaaccaactgcttttttgacaaaacaccatatttttcaccaaagaatgaaaaactttgtttgttcagacttgggcagtaggaaaacattttcttgcaagtgagcctgtcacttcaaaaataactaatatttgttgccaatgatataattcaatctgtcatgttaaaattagaattttgtaaaatgtttattcataattttgagctttatagcttcctaatacattaagattttttatgagatgggtggtaatattaacatgtgattttttgatgttgtatagtgaactacgtcaacatttcaaagatctgcataactctttgaatcagtattttccaaatgaccagtgtatgatgttacaaaattacacatggataaaagattattcaaagtgcaatgtaacatagtatgaaaagttcacagatatgattttatattccacattgtacttaacctgccagacactaccatttcttaagttttagggtggtgtcaaagaaaaatatccacagttatctgcatggactagtaaaatattctgccattttccaactatgtaccatgagaggctagattttcttcatatacttcatatatatgattttcttcatatatttcaacctaaataacatattgccatagattgaatgcagaagcagatatgagaatccaggtgtcttttattaaaccatccatttaaaagatttgaaaaaatttaaaacatcttttgttttgttttagaaaagattatttttataacaaatcatttatgttaacagttaatggtttattgttattttaagtgaattagtaaatatcttaaaatttctctgtttaaatttttaacatgacaaatatcaaaatatataactacataaactaaaagtcttttgggtcctcaatgatttttcttgacatttaagaagttaaacccatatttatttactgacactgtaaaaccttacataaaacataagtagtaagtaactaaaatgttaaatctaaatctataatgttaaattaaaatctaagccttacatagaaattaaaattcgctaaactactgatgctatgttgtacaaaactgtactccttttagttcataattggtcacctccatattcagttggaatattaggttggtcagcttaaatactgtggctttgttttggttatccacagaatctttacacccaaatgttaatgcataaaaagcagcaagacattgttaaatgaaacagcaatagtgcagtttagacctgtgaccaactatatatgattaaacttacttcccacattcacatcacaataatcatccatcatttaatagctcaaccaaaatgttatacagtcatcaacaggcaaggcacatgaaaaccccgcacaaccaagaatgatttgggcccaaatgtcagtagatttgagtttggaaaaaccttcttgtagttgttaaggctcaatggctctggttaatttaatataataaacaacaacttcataatggaaaaaaattaaatcctctattgaggtataaaacctaattaatttataaggataaagtaagtgactaccttgaagtcaaaacacattatggacaatgaaagagtattacgattgttccaaattgacaagggtatttaaacctaggtacacaatctttcttaaaattaatttatagaaagtcataacctgtgggtacatgaatatgaatatacatcttctccaacttgacaagtacattattgctgggacaggtaccttttaataacaagtaacttattagcctagaaaggccaaacttctctttttattgtcagcttttggtttttaatatacctggggttatataaacaaaaacacagtcatagtagttttgggctaagtaaattctggattatgtcaaagaaacctgattgtttctagtatcttttgtaagcgaaagagcaaatctttgtgcttgctcagtggccttttaggaaacctgaaaggcagattttatgtgaaagacataatctgttacaatctgtttcattattctgaattggaaaaggcattaacaaaaagagttgtcagaggagcttttgacaagaacaatagttgtgactaattaatcagaacatcaacacaatatttaaaataatgagaaggtagcaagattttaatttttatttaaataaaaaattctgttctatttaaaaatagtttagatgtgtagtataaggtagctaaaagcatgaaaattatttgactcttaaaatttgaagcatacacagaagtgtggcaaaattatgcagatttattttcttcatgtattgaagaaaaagaataatactttaatttcctcatatagagtggacagtttactccaagatcatcattttcccttagctagcagtcttttctatcatatcatacttatgtcacttttttcatacattatatgacatagcatttcccatatgcatttaaacctgctaatattgtcaatataccatgctgaatgacactataatttaaagctttattttcaattttaaaatataattaacagtattaatgtgttataagatgatgtgtgtatcacattgatttttgacagggtagtttgagcttagttgagtgaaaatatgtttaacaatggtcaagaaataagtaaacttaattgaaaaataactcaaaatatttgttcttcctcttttatgaatatcttcttaggaactttttatgcaaccagaaattatttattagtaactctcaagatcattttgtctaagtgaattggagatcttataatttaaagtgatccttaaatagcaatacaattactgttgatttttaaaattgatagacatttaaaatttttaaataaggtaaaatctatagagtcacataattgcagcattatatgaagttataaaaatcaatccttttataaaaattctggctaataaatctaagtaaatgtaaaatttaattgaactttatatttttacaattgtgaacatttatgaaagcaatgtttgctttatctcaggggttggaaaactctggctctggaggccaaatccacctgtttttgcaaataaagttgtattggaacatagtcttgcccatttgtttatatgtttacatattgcccatggctgccttgataaaatggcagagttgcgaccattgagttgttagacaaaagagttgttagacaaaacaaaatcagccaaagctcattatgataagaatttgattcccattaagatacattggatgaccacaactgggcacataagggcttgattgatggaagctgacatttggtttgagggaacatcagcgtgggaaaatgagggacttgttgaagcgacctctgtggaatcctccagaaaactataaaatcagaacattcagatcacaagagctgcaaaatcaaggctgagtttgttatttaacaagggagtgccttaatgccaaggagtgagttcagtaagtctcctaatttgtcttttatttctactgtagtttttttttttttttccctagtgaaggaaataaaatgtgtggttttcttgttttctttcagatttggagtcaaaaacgtatgagaccaaaaaaatattttcagaaaatgatatttttgaaataaatttttcccagtgggagatgaaggacaaaagtaaaacccttggccttgaggcatccatcttcagaaataattggaagtgcaaaagcatattcgagggactaaaaggacatcaagagggatacttcagtcaaatgataatcagctatgaaaaaataccttcttacagaaaaagtaaatctcttactccacatcaaagaattcataatacagagaaatcctatgtttgtaaggaatgtgggaaggcttgcagtcatggctcaaaacttgttcaacatgagagaactcatacagctgaaaaacactttgaatgtaaagaatgtgggaagaattatttaagtgcctatcaactcaatgtgcatcagagatttcatactggtgagaaaccctatgagtgtaaggaatgtgggaagacctttagctggggatcaagccttgttaaacatgagagaattcacactggtgagaaaccctatgaatgtaaagaatgtgggaaggcctttagtcgtggctatcaccttacccaacatcagaaaattcatactggtgtgaaatcttataaatgtaaggaatgtgggaaggcctttttttggggctcaagccttgctaaacatgagataattcatacaggtgagaaaccttataaatgtaaagaatgtgggaaggccttcagtcgtggctatcagcttactcagcatcagaaaatccatactggtaagaaaccttatgaatgtaaaatatgtggaaaggctttttgttggggctatcaacttactcgacatcagatatttcatactggtgagaaaccctatgaatgcaaggaatgtgggaaggcttttaattgcggatcaagtcttattcaacatgaaagaattcatactggtgagaaaccttatgaatgtaaagaatgtggaaaggcctttagtcgtggctatcacctttctcaacatcagaaaatccatactggtgagaaaccttttgaatgtaaggaatgtgggaaggcctttagttggggttcaagccttgttaaacatgagagagttcatactggtgagaaatcccatgaatgtaaagaatgcggaaagaccttttgtagtgggtatcaacttactcgacatcaggtatttcacactggtgagaaaccctatgaatgtaaggaatgtgggaaggcttttaattgtggatcaagccttgttcaacatgaaagaatccatacaggggagaaaccctatgaatgtaaagaatgtgggaaggcttttagtcgtggctatcaccttactcaacatcagaaaattcataccggtgagaaacctttcaaatgtaaggaatgtgggaaggccttcagttggggttcaagcctagttaagcatgagagagtccatactaatgagaagtcttatgaatgtaaagactgtgggaaggcctttggtagtggctatcaacttagtgttcatcagagatttcatactggtgagaagctttatcaacgtaaggaattcgggaagacctttacttgtggctcaaaacttgttcatgagagaactcatagtaatgataaaccctacaaatataacgaatgtggggaagcctttctgtggacaacttactcaaatgagaaaattgatactgatgaaaccttatgattgaaagttgtaaaagaatattttgtgtgtgtgtatagacaacttatcataataagaactcttactcttgagaaaccttgtgaatgtaagggttgtgcaaaagccattcatttctgtttatgggcaattatcttgctatccagcaattcatactagtgagaaatattttgaatataattaatatgaaaaggcctttagacttctgtacagtcttattggatatcaatttatactgatgtaaaatcatttaaatgtaaggaatgtgtgaagatcttcattcatgacataaggtctgattaacatcaaataattggtatttgttaaaaagagtttaaataggaggaatgtgggaaggacctaaacttaattcagttcttgctgcacatcagagaattcatactgctgtgtaatcctatgcacataaggaatttgggaaggcttatagacacagtaaatatcttagagtacatcagagaattcatccaaatgagaaatcatttgaattagaattataggaaggcctttagacaaatgctacccaaattattatccagagactggtgcagtcataaaattgtcatctgtcaattgtgagataaacgtggaaagtgagtaaatatttggaacttttatagcaatttgacatttccataacattctgttttacaaaattatcagtccataaatgattgagaattgaaaacaaagtttgttctttcccagaaataatttgagacaagactcacacttttcaagacatgagacaagtgacaatttaaataagaaattcttcacttgcacctctctgattagaatagcagaatattcatactatagcaagatttggcaaatgagggaatcaaaattttctaatgcctgtaacagcataagataatttataccagatatgttaaatgtgcagaagccttccaacactattcagtctttgttaaacttcagtaagttcatcctagagagtaactctgttaatgtaacaaatgtaggaaaacccttatccatggcaaataccatactgtcatcaccatttcacctccatactacctgtaggatggtgagcaaaatgcttatctcttctggacatgatgtttcaaatgctgatggtaactaataatgctgttacagagattagatggatttagtatgcatcatatccttggaagagtatctggtatgtagcctatgcttaatacatattagctattgttcatattgtctttattattagtattactactggtgaattcttaggagaggcacaaccgttttgaggaatgaattcagaaaagcttcccataaccactcatccatttgaatttcagatagttcattctggataagatctagtacagtataaagaatttgaggggattttaattcagagtttatcccttaagctgagctaaaaaaatgagacttgaaaaaatccagacttttgaagagtttaggaaagctgttttatagaatgtcacacattagtttcattcctcatggtgaaatttgatatgggcctctccttcacatttctcgtaacatgaagttggaaatagaggcttaaacattttttaccagaacacttcatagatggtgatgtgtacttcatcttgcaatacctcagaagcagatagtatccatttcccccagtatcaccagtgccaagtttgatcacttatggtaactactggagttgtctgttataaagatccattatatacctaataggattggtcagccttgatcaatgatctttggaaatgtgtgatcatatggtatgtattttacttttttttttttttgggacaggatctctctttctgtcaccaaggctggagtgcagtggtgtgatttcggctcactgcaacctgcacctctcgggttcaagtgattctcgtgcctcagcctcccaagtagctggatacacaggtgtgcaccaccatactggctaattcttgtatttttagtagagatggggttttgccatgttggtccaggctgatcttgaactcctgcacctgcctcagcctcccaaagtgttgggattacaggtgtgagacactgcgcctggctatattttactatttggaaatcacaatgcatcttaaaattgatggcttcttgcaaccactttcaaccaggtgcctgtcatgatttagtgctagcatcaaggcaggttagttatgaagaaatagagtgtgtgtttatatactcacacagttagaaatcgacccttttaaaaattatttctttttgaaaataatgtcagttccatcagaactaatgcattgataactaaatgtctgtggttccttgtcataggtctacacctgacctctctattttgtgcacataggggattcgtaatatcactgttcagtcagtcattcaccatctagtgatcatcattctacatgattgcactttttcaaaggcataaaaagccaacagttgcactcttaataatcaactgtaacacaaagcagagtactttgggagttttaacaggatatattattggtaactggctattatgccactccctctgggtgccacatttgcctgttaaccaagaaatgtagacatggtgccttatcccaacatttctgaaattatatctcaaggaatcaccagtgcttactagtacttgacaatgaaggaggattttacagttaaagaagcttataaagtagcatctactaaatcccctcctaaggaacaagcaaaagcacctcaccagcttatcaaaagactaaagagaagtgaaaaaaaaaaaaagacggccgggcgcggtggctcatgcctgtaatcccagaactttgggaagccgaggcgggcggatcacgaggtcaggagatcaagaccatcctggctaacacggtgaaaccccgtctctactaaaaatagaaaaaattagccgggcgtgg[180 bp omitted]aaaatggttgaactttgtttaaactggtgtatggcaaacttcactgttgaaatacttattcccatgacctattatctttgtaggtgggtgaaattgcattgggaactgctgctataaccaaaagagaatttcagtcaccatgtctggttgttagctatgatggaatggcagcatcatggtctcagttatgagtgaaaatctttgttgtagctaagtagtggtgcctcctgagttttattaaatgccgtttcactatctttttctgcacttctatagtatttaatttgttcatgtgataatttattctgatagattcactgactttttcccattcctggatattccaggttagtcatagtatccttctgatgcattgcttgatttcattttgccattttatttagtatttttgcatctcatgagtgagattatataatagttttcttttttattgtatttttgtttgttttggtattgcaatagcctgttttttaatattgtatgatcctattaggttattttgtttgatccttgaccacttttctagttccatctgttgcatttttttttgtcttttaattcctacttcagacataacagatttattgagtgttagcacagttcctttaaggagccttcatagccatgtagtactagccaagatccgcataaaagacgcatcccagcatggcccctaaaatccttcattatgtgctcttaagaataatgtgttgggaagtcagaacttccttatagggctgttatgatcatacttgtacatgtcttttggagcacacgtgtacacatttctttctgtatatactgggagtggaattgctggggtgtggtcatggatacacatctgttcaactttttagtaagtttaaattcttctgaacagttttccaaacaaatgaaccgtcttatactctcaccagcagtatatcaatgttctgctttctccacatctttgaaaatacttgacatcatcagtttaaagaatattttcattactctcataggtaatatagtggcatttgattgttgataattgtggtttaattttccattttctgattgctgcctatttgtatattcttgcaatttctcttcgctccttgctccgggcattggatgcattcgatgtgtctgttttttacagagcctctgttcagtttgcaggacaacaattaacacctaggccatgacattctctctgtgtgtgtgtgtgtgtgtgtgtgtgtgtgtgtgtgtgtgtgtgtattccccaccagtgagctggttttgatgactgtgatggaatcagctttatctctgcatctccagttcccagtatgaaccatgacccttagttgtttgat[131 bp omitted]ggctaacacagtgaaaccccgtctctactaaaaattaaaaaaaaaataaataaataaataaaacccaaaaacattagccaggcgtggtggcgtgcgcctttagtcacagctactcgggaggctgaggcaggagaatggcgtgaacccaggaggcggagcttgcagtgagccaagaacgtgccactgcactccagcctggtgacagagcgagactccatctcaaaaaaaaaaaataccacattggctagaacaatgaggaagtatattgaatgatataacatgctttcagagggacagtgggctccagatatttttgattcatcagcaaaattaaatttctttttttttttttctttttctttttgagacagagtctcgctctttcacccaggccggactgcagtggcactatctcggctcactgcaagctccacctcctgggttcacgccattctcctgcctc[222 bp omitted]ttccactctgcactccccagtgttggctggcaccatgatggctggcaggtttccagatattacaaacagacatgacaacatccacagaaaataataagggagagcatctcccgtgacaggagcaaggaaacatttcccattggccagcagcgtacatctgcttttagttgctaaaatgggttatatgtaattcctgaaataatcattggtattactttaaattagccatagactctcaaaggttttagttaaataaaaaatcagactcttaagtttcattagctttttatgtatgagacataacaagtgatcctttattttaaaaagtaaaattacaaatatgtataaatttcataatacagataatttaatgtatatattaagaccacaaacataatttcacctttttgagattaatgttaatttttaaaagcagaaattctgaaatataaagtctatattgttagaacatttactaggaattttttatgatatagaatattatctgattgtttgtagatgtaggggacagggaaaatatttttggtctaaccttgttaagtattttttcttccagactcagaggagcctactcttaatttctagaattctgttagttaacctgaagactgagaaggccaagatttacaatgtggaaatgaaaccaaggtgtaattggaatttgggtgaacatatttactcaattcattttttaaaatttgagacagagtctctctctgtcacccaggctggagtacagtggtgtgatctcactgcaacctctgcctcccgggttcaagcgattctcctgcctcagcctcccgagtagctgggactacaggcgtgtaccaccgtgcccagctaatttttgtatttttagtagagacagggtttcgccacgtaggccaggctggtcttgaacacctggcctcaagtgatctgcctgcctccacctcccaaagtgctgggattacaggtgtgagccactgtacctggcctcagttcatttttacagcacacatacatagcactaaattcaaaagaaataaaaatcttatctctcaccttttctgaagctttaaaatcacccttttcagagacaactacactttccagcctcttctgtgttcttgagcagatagtccatgtaaatagcagagtacattgccttagagtagacattcaagatttgaaagtattcctttactatctcataattcagtgttagtcatataccagtgtcattatggatttcatcaataaaaattttggttcaatttattttcactatacccaagtgtttactgtggaggaagggtctgcagtgtccttggccacatttaaaaaatatggttcattccggactgtttgcccagatctctgcctggtgcacaagagatattgtggcctctaccaccatcaccactgggattctcttcacctctctcctctactgaatttcttgttttctactcattcattctggtggaaaaccccttccacttgctttctttgaagaggtgacttggaaataattcacgtggttgaaaggattttattctacccttctgtttttggtgtctccctattcttggccagcaggttcctaggcatgttcttttcatagtagatggcagaaacacaagaggctgagccaaagcatatttaaagtatctatatccattgtaatccacccaaattctgttgactagacacatggccaagcccaacaccaatggggcagggatgagctctgccaagggtggagagtaagggaagaattgtgggcaaatattctaagccaccagattcataccaacattactggcatgactgtgagtcaacacattccactgtggggggcaactgagcaataattaatgatgtcattgagaatagtttattcttcacaggcttcttgtaattcaggtctctgcccaaatgccacctgattgaacaggtctttcttgaccacccacttgactagccccacccttctgtcagtcacactctttcagattatttttaaaaatttcctcatttcaccaaacactaagtgacattctttgattttatttatgtatttatttattttattttttgagagggagtcttgctctgtcacccgtgtcggagtgtagtggcatgatcttggctcactgcaacctctgtttcccgagttcaagcaattttcctgcctcagcctcctgagtagctgagattacaagcatgtgccaccacgtccagctaatgtttgtatttttagtagaaatggggtttcactatgttgctcaggctggtctcgaactcctgacctcaagtgatcacctacctcagcctcccaaagtactgggattacaggcgtgagccaccacgcccggccaggcattctttgattttaaataatgtgtcaaagaaagtgacattatttgtccccatgttgattgtctacactcttggacataagttccacaggatcaggggatatgcttctcttgctatcattgtatctccaatatctagagaaatgtatggctcagagaagatgctcaaatatttgttgaaggaataaaagtgaaaatggattgattcatatttagactctaaatagaggtggagtactgctgcctcctttagagaataaaactcaaggctctgaatagtatgagtttctcatatttagggaaggaaaatatgtgaggactaaagtagagttaaatgcactgaggaagctaatatttataaggatgcaatttggaataatatgacttcctggatttaattgacttctggtaatttgaatgtagtgtgaaggaatcaacccttattctttgattctggaactcacaccacacaaaataatgcagaggttgagggcattgtctcagagactaaacctccaccacttactagtagtttacttaatgtcttaatctcaagtcacttaatctttagtatctgtaatagagatataacaatagcataaccatgtcgtagcactgtggagggtattatatgagtgaaaacatgcagcatggttaaggcactgcctgtaagttctgtataagggattcccacagacctccagatctggcttgccaagactataagtggcatccaaaaggcatgggcaaaagccctgagtccataccttttctgaattcttatattagttctaataatttatctgatgattttttggtgttttcttggcttactatcatattatctaaaatgttaattttatcgtgttctttttatgtattttctttctctggctttatttatatatttttttgaatagggtctttctctattgcccaggctggagtgcaggggtatgatcatagctcactgcagcctgaaactcctgggttcctttggtccttccacctcagcctcctgagtagctgggactgcaggcacaggccaccatggctggctggtttttaaactttttgtagagacagggtctccctatgttgcctggactagtctcaaactcctaggttcaagtgatcctcctgcctcagcctcccaaagtgttgggattacacgcatgagctgctatgcctggccctctttttcttgctttaaagcaggggtccccaacccccgggccacagactcatactggtctgttaggaactgggccacacagcaggaggtgagcagtaggagagcgagcaaagttcatttgtatttacagccactcctcatcactcacattactgactaaggtcccccttctgtcagatcagtggaggcattagattgccatagtagcatgaaccctattgtgaactgtgcatgcaagagttctaggttgtgcattccttatgagaatctaatgcctgatgatctgtcagtgtctcccatcacccccagatgggactgcctatttgcaggaaatcaagctcagggctcccactgattctacaaaataatgagttgtataataatttaattatatattctaatgtaacaataatagaaataaagtgcacaataaatgtaatgtgcttgagtccaagcagataagtctttccctataaaacctactccaaaatattggaagatgtgagtttcactagatgactagaaatcaacatagggaaacatcaaacatgaaaatgcaagaaaacgtaacacctccaaagaaacacaataattctttaataatagaccccaatcataaggaaatatatgaaatgccagaacaaaagttcaaaataatgattataagaaaattcaacaaggtacaagagaacacggatagataattcaacaaaatcagggcaacaatttacgatttgaatgagaaattcaacaaagagagaaacatcataaaaaagaaccaaacaaaatttagagctgaagaattcaatgaataaaataaaaaatacagtcaagtgcttcaaaaacagactaggccaagcagaagaaagaatttctgaacttgaagacaggctgtttgaaataacataggcagacaaaaaaagaaaaaagaatgaaaaaaccttacaggatttgtggcacactattcagtgaacaaatattcacattatgggcattccagaaggagaaagttgagggaaacatatttaatgaaataatagctgatttattcatagatggcagaaattaaaagaaataatagctggaaacctataaacaccatcttgaaaacatgcaaaactataaaactcactggtagagccaatgcacaagaagagaaaggaatcaaaccttatcactgcagaataccacccaagcaaaaataataagagaagaagtaaggaacaaagaatatataaaacaaccagaaaataatcaataaaataacaggagtatgccctcacctattcataataaccttgcatgtaaacagattaaattccatatttaaaagatataaactggctaaatggattaaaaaaaaaaaaaacaagacctaactatatgctgcctataagaaactcacctcacctataaagacacaaataggctaaaagtgaagagatggaaaaaggtattccatgcaaatagaaaccaaaagtgagcaggaatagctatatgtatattagacaaaacaaattttaggtcaaaagctgtaagaacagacaaagaagaacattatataataataaagggataaattaaggaagaaaatataacaattgtaagtatatatgcacccaacactggaacactcagatttataaagccaatattattagatctaaagagagagataaagcgaaatacagtaatagtttgggacttccacactctactctctgcattggagagattatctagacagaaaattaacaaagaaatattggatttcaactgcaccatagatgaaatatacctaacatatttatggaacattctgcccaatgggtgcagaatacacacttttttcatcagcataataaatacctatgtcaaaaatagaaaatttccaataaacaacctaattatgcatctcaaggatctagaaaagaagaacaagcccaattagtaggagagaaataataaaaatcagagcaaaaataaaattgagagtcaaaaatacaatagagcaatgaaacaaataattgtttttttgaaacaataaaatcagcaattagccagactaaataagaaaagagagaagactcaaataaataaaattggaaatgaaaaatgagacattacaatggataccacagaaaaaaggatcattagacaatactatgaaaaatatatgccaatacaattttaaaactagaggaaatggataaattactggacatatgcaacctactaagattgaaccaagaagaaatagaaaacctgaaaagactaatgacagataatgagattaaatcagtaataaaatgactcccaataaaaaaaagtccaagaatggatggttttaattactgaattctaccaaatctttaaagaattaataccaatttttctgaaaatatttccaagaaattgaagcagagggaactcttcctaaatcattttatgagaccagcataaccctgataccaaagtcaaataagaatgcaacaaaagaaaactacaggccaatatccttgatgaacagaaatgcaaaaacctcagcaaaatactagcaaatagaatacaatacatcaaaaagacaatacactatgatcaagtgggatttattccaggaatgcaaaaatggctcaacatatgcaaatcaataaacatgatatatcacatcaacagaatgaaagacaaaaaccatatgatcacctcaatagatgcagaaaatgcaactgataaaattcaacattccttcatgataaaaactctcaataaattaggtatagaaggaaagttcctcaacacaataaagaccatatatgacaaacccaaagctgtcatcatactgaatgcagaaaagctgaatgattttcctctaagatctggaacaaaacaaggatgcccactctcagcactcttattcaacataatactggaagtcctagttagagctattaggcaagagaaaaatagcgggcatccaaactggaaggaaggaagttaaatagttcttgtttgcagactacataattttctatatagaaaaacctaaagactctaccaaaaaactcttagaacagataaacaaattcactaaagttgcaggatacaaagtcaacatgcaaaaatcagtatcatttctacacacgaaaaacaaactagctgaaaaagaactcaaaaaggcaatctcattttctaaagctgcaaaaacaacaacaacaacaaaaacctaggaagaagcttaaccaacgaggtaaaagatctctacaaggaaaactacaaaatgctgatgaaaaaaattgaagaggatacaagtaaatgtaaaaacaccttatgctcatggattggaagaattaatattgttaaaataaccatactgccaaaaggaatctacagattcaatgaaatccctatcaaaattcccatggcattcttcacaacaacagaaaaaaatctcacaatttgtatggaaccacaaaagacctcgaatagtcaaagcaatcttgagcaaaaagaacaaagctggaggcatcataccatgaaacttcaaaatacaaaacaaagctgcagtaacccaaacagcatggtgctggcataaaaacacacatagaccaatggaacagaatagagaacccagaaattaatccatatatacacagtcaactgatttttgtcaaaggtatgaagaacactcattggagaaaggacattctctttaataaatgttgctgggaaaacggaataaccatatgcaaaagaatgaaactagatacccatctttcatgctatacaaaaataaactcaaaatggatcaaataccaaatgtaagaccccaaaccacaaaactactagaagaaaacataggggaaatgtttcaggacactggtctgggaaaaattttaatgaattttttttttttttaagtaagaccacaggcaacaaaagcaaaaataaacgaatgaaattatatcaaactaaaaaggcttctgcacagcagaggaaacaatcatcagagtgaaaagacaacctagagaattggggaaaatgtttgcaaactatttatctaacaggggattaatatccagaatatacatttcaacagcaaaaaaatttttggttaaaaaaatgggcaaattttttgaacaggcatttctcaaaagaagacacagaaatggatgacaaatatatgaaaaattcccagccttatcatcaggtaaatgcaaatcaaaaccaaaatgaagtgtcatctcatcccacttaggatggttattatcaaaatgacaaaaaaattagcaagtgctggcaaaactgtggagaaaagggaactcttatatactgttgatgggaatgtaaacttgtatggccactgtggagaacagtatgaaggctcctcaaaaaaacctacgaatagaagtaatcatatggtccagcaatcccacccagacatttatcaaaggacaggatatccgtatatccaagagacatctacatccccatatttattgcagcactatgtataatagctaagacatgaaatcaacctgggtgtccaacaacaaatgaatggataaagaaaatgtggtatatatacacagtggagtactaagccataaaaagaatgaaatcctgtcattcacagtaacatggatggaagtgtaggacattatgttaagtgaaataagccaagaacagaaagttaactgccacatgttctcattcatatgtggaaaccaaaaaagttgatctcacagaagtaaaaagtagaacagaggatactataggttgagaaggggagaatatgaacagatttgttgaaggatgaaaaaatcacagctagataggaaaaataaattctagtattctatactactgtgggatgcctatagttaacagtaatatatagtttcaaatagttagaaggaggatattgaatattcccaatacaaagaaatgaaatatatgaaatgatggctatgctaattactctgatctaatcactatgcattttatatgtatgtgtgtgtatatatatacataaacatcactatgtaccacataaatatgtacatttgtcaatttttaagtttctataagtaaaataataggtttttaaccccataaagtatttcataacaatttaattttaattgtaatcatccaaatgaatagatgcttaggtgctaattaggaaaaaattgctagaaataattttttgaagtattatatatctttagaagtatttctctacttctggaggtggagggggaagagagacatatcactaagtcagagcaagggtattgggaataccttgctctgtgtatcaagaattatctgtatactgcataaataataattcttgaatgtatgtaacaatctttaggtatatagatgctgttttaacaaatgacaaaatttttaaaaagttaaaatatattaaatctcacacacacaaacacttacagaccatacatggcaccgtttgcagttggagaaatgtaattaattgtaaagatgcagtattaaattataactgcataaaattaaccgtagaacatactgttctattataataatatcatagccacctccagttgttattgcagtggatgcaagtgttgcaagtattcacttaaaacactatgtgatactagtcatttctgtgggagcagtttatctctccagtaaattgcatattgcagtaaaaagtgatctcttgcagttctcatatatttttcatcatgtgcagtgcaatactgtaaacgatgaataacagcatggtgcccatacaaagcactgcttgtgatattcgaagtgctcccaggaagccgtgaaaagttattacattacaagaaaaagttgaattgcttgtcacgtaccatagactgaggtctgtggctgcagttgcctgccatttcagacagatgattcatcttataaacagattatgtaaatatgttattgataaatacagtatggtactgtaaatgtattttctctttatgattttctttaaaatatttttctttctcggccagcactttgggaggccgaggcaggcagatcacctgaggtcaggagttcaagaccagcctggctaacatggcaaaaccccgtctctactaaaaatacaaaaaattagctgggcgtggtggtgtctgcctgtagtcccagctactagggaggctgaggcacaaaaatcgcttaaactccagaggcagaggtttcagtgagctgagatcacgccattgcactccagcctgggtgacagagcgagactctttctcaaaaaaaatttttttttctttctctagcttcattttacgaatacagtgtgtaatacatatagcatacaaaattgtgttaattgactgtttatgttattggtaatgctcaatagtaggttattagtagaagttactaattggtggagtcaaaagttacctctcgatttctgactgtacagggggttggcactcctaacctctggactttcaagggtcaactgtagttgttatactgtatttttaaaattttgcattttttattgtcttattgctatttttttggtcctcagttggttgaatctgcagatgcacaatccacaaatacagagggcagactgtatttgctttgctagtatttacttttggttaatgtgcatgtgtgatttatgaatgatggcaatagctatgcagtggcagaaagttgggagtttatgccccataatgtgtttttgaaggcagaatactgctaggtgaaattgaacaaaacctaaatatatagagaaatataccatgttcatggattgaaatactccacattgttaagatgtttattcttcccaaattgatatgaagattcaatgcaatcctaacaaaaatcccagcaaacattttgtaaatctttccaagctaattctaaaatgcacatagaaataaaaaggtctagaattgccaagagcagtcttgaagaggaaaaactttggtttcaaagaacatctttatttctgccttcatttcgttatgtacccagtagtcattcaggagcaggttgttcagtttccatgtagttgagcggttttgagtgagattcttaatcctgagttctagtttgattgcactgtggtctgagagatagtttgttataatttctgttcttttacatttgctgaggagagctttacttccaagtatgtggtcaattttggaataggtgtggtgtggtgctgaaaaaaatgtatattctgttgatttggggtggagagttctgtagatgtctattaggtctgcttggtgcagagctgagttcaattcctgggtatccttgttgactttctgtctcgttgatctgtctaatgttgacagtggggtgttaaagtctcccattattaatgtgtgggagtctaagtctctttgtaggtcactcaggacttgctatatgaatcttggtgctcctgtattgggtgcatatatatttaggatagttagctcttcttgttgaatcaatccctttaccattttttaacggccttctttgtctcttttgatctttgttggtttaaagtctgctttatcagagactaggattgcaacccctgcctttttttgttttccatttgcttggtagatcttcctccatccttttattttgagcctatatgtgtctctgcacgtgagatgggtttcctgaatacagcacagtgatgggtcttgactctttatccaatttgccagtctgtgtcttttaattggagcatttagtccatttacatttaaagttaatattgttatgtgtgaatttgatcctgtcattatgatgttagctggttattttgctcgttagttgatgcagtttcttcctagtcttgatagtctttacattttggcatgattttgcagcggctggtaccggttgttcctttccatgtttatcgcttccttcaggagctcttttagggcaggcctggtggtgacaaaatctctcagcatttgcttgtatgtaaagtattttatttctccttcgcttatgaagcttagtttggctggatatgaaattctgggttgaaaattcttttctttaagaatgttgaatattggcccccactctcttctggtttgtagggtttctgctgagagatccgctgttagtctgatgggcttccctttgagggtaacccgacctttctctctggctgcccttaacattttttccttcatttcaactttggtgaatctgacaattatgtgtcttggagttgctcttctcgaggagtatctctgtggtgttctctgtatttcctgaatctgaacgttggcctgccttgctagattggggaagttctcctggataatatcctgcagagtgttttccaacttggttccattctccccgtcactttcaggtacaccaatcagacgtagatttggtcttttcacatagtcccatatttcttggaggctttgctcatttctttttattcttttttctctaaacttcccttctcgcttcatttcattcatttcatcttccattgctgataccctttcttccagttgatcgcatcggctcctgaggcttctgcattcttcacgtagttctcgagccttggttttcagctccatcagctcctttaagcacttctctgtattggttattctagttatacattcttttaaatttttttcaaagttttcaacttctttgcctttggtttgaatgtcctcccgtagctcagagtaatttgatcgtctgaagccttcttctctcagctcgtcaaagtcgttctccatccagctttgttccgttgctggtgaggaactgcattcctttggaggaggagaggcgctctgctttttagagtttccagtttttctgttctgttttttccccatctttgtggttttatctacttttggtctttgatgatggtcatgtacagatgggtttttggtgtggatgtcctttctgtttgttagttttccttctaacagacaggaccctcagctgcaggtctgttggaataccctgccatgtgaggtgtcagtgtgcccctgctggggggtgcctcccagttaggctgcttgggggtcaggggtcagggacccacttgaggaggcagtctgcccgttctcagatctccagctgcgtgctgggagaaccactgctctcttcaaagctgtcagacagggacattttaagtttgcagaggttactgctatctttttgtttgtctgtgccctgcccccagaggtggagcctacagatgcaggcaggcctccttgagctgtggtgggctccacccagttcgaacttcccggctgctttgtttacctaatcaagcctgggcaatggcaggcgcccctcccccagcctcgctgccgccttgcagtttgatctcagactgctgtgctagcaatcagcgagactccgtgggtgtaggaccctccgagccaggtgcgggatataatctcgtggtgcgccgtttttttaagcccgccggaaaagcgcagtattcgggtgggagtgacccgattttccaggtgccatccgtcactccgttctttgacttggaaagggaactccctgaccccttgcacttcccaagtgaggcattgcctcgccctgcttctgctcccgcacggtgcgcgcacccactgacctgcgcccactgtctggcactccctagtgggatgaacccggtacctcagatggaaatgcagaaatcaccgtcttctgcgacgctcacgctgggagcggtagaccggagctgttcctattcggccatcttcaaaactttgggatatttagcttaccttgtttcaaagcttaatataaagctatttcatagagtgtagtatttgtataaggaaagttaaatatatcagtgtaacagaagacaggctccagaaataattccaaatatatacaaccaattgatttataagagtcacctatgcaaatcaatgagggaaataattttttatcttaaaaaatctatttggagagattttataataaaaaaattcctgcaaactattcaaaaatccatcaatagaagaacagatgaataaactatggtatattcataccttgaatattactaaatagtaaaaagctataaactactaatctaaggaataacatagcagaatctcaaatttttctattgaatgaaagaattaaggaatagtagtattcataatgtatgattccatttacatgaagatcaagataaggtaaaacacattaattgtaatagaaatcagaacaacagtagccttaggagaatgaaagataagaagcaagagagaacttttaggaatgatggaaatgttctgtaagtgtcttcctgttgcagatactctgaatttttgatgagttggggatgagtccttacgtggaaacattcatggaaagtattagctctgggtttttttttttgttttattttttgtttttgacaagagctcactctgttgcccaggttggagggcagtggcaccatttcggctcactgcaacctccgcctcccaagttcaagcaattcttgtgcttcggcctcctgaggagctgggattacaggcatgcatcactgcaccaggctaatttttgtatttctagtaacgtcggggttttgccatgttggccgggccaagaactcctggcctcaagtgatccgcctgcctcagccttccaaatgctgagattacaggtgtgagccattgtgccctgccttgatgtatttatttgaatacttcaaaaagaagaagagttacagtgatactaaggaaataattattagtaattaaatggaaatacttagtactttataattaaattattattctaggttgaaaagtaagtatggacaaaatttaaaatttaaaataaatgaaggcatattacacagaattgagtggagaccagtactatggtcagaattgtaaaaaatgagcctggaagataatatactatgaatttcatgatgaatgtcaattgcaatttgctgtgagagagcaaaaaaaaaaagctgtttattacataacaaattaaattgttaaagagaaaaatattgtgaaacattttcagcaaatacatagtaaatttgatgagacgttttctcttgagaagcaaaatggaatagatgaagttagttgcctgaaattagaattaaatgtccaaccaaaatatttaaacaatttttaaacagaatctgagtttataacctttttgagctataaaatggctctgattcttgcacaaaaaagaaatgttggatatagagataagataaattattagtttggttgcaaaaatcttgttagcatattctgagaaagactaaaatgatcttataaaaagtaaaaaaaaattaagtcacctaaaaactgctcatagaatacaagatatttctaacaatatcatggatcaattaattcaaagttagcaaaagcttcaagtactcttctttagccatatatgagttgtgcaatataagataatttagcccaattgatactgtgggtacattttgtctcaaaagatccccaaataaaaaaagctgtcaattcgcagcctacaaaaccagagtcatgacatagatatttttgtcttttatatctgtcaaagaaaaatttctgttaggtatcaaaaaatatttctatcacaatagatgatacaccagctgtattaggttaaaaatctgaattccttggaattttaatgcaagagactgatgtctccctaactgctttgctctactgtataaagaatatacctatgaagtatatacatgtaaatattatgaatcacgactacttcatggaactgttaaaagaaatagaggtcaggcttggtggctgacgcctgtaatcccagcattttgggaggctgaggggggcgatcatgaggtcagcagatcaagcccatcctggctaacacggtgaaaccccgtctctactaaaactacaaaaaattagccaggtgtggtggtgggcacctgtagtcccagctactcgggaggctgaggagaatggcatgaacctgggaggcggagcttgcagtgagccgagatcgcgccactgcactccagcctaggtgatagagtgagactccgtctcaaaaaaacataacaaaacaaaacaaaaaagaaatagagaacaattaatcttatgttctttcccaatgctcatctgtttaatggtgtaagacatttacaaagatttctcgtactttgaactccagttcaagattttctttaaagaaagttttccaaatatttaataataaaggaaaaagaagacagtgattttttttctcaccagtatcacattgcatatgaataagcaaaatctgaaactccaaggaaaggaaagcttttttttcgtgacctagtgaaaataataggaacattcattgaaatgaaaacttttcactgtataagttcataataatgattttatatatttttctagcatgaatcaatatatagaggattttaacaggactgaaaagccttgtgaaaagatgcatgcaatgaagaaataggcaatcttagtaaagaaataggaactataaaagtactaaaggaaaattctagaactgaaaaatgtaatatctgaaattaaacaatttgatagataggcttagcagcagaactgaaatgacagagaaaaagaataagtgaatttgaaaacagagtaacagaagttgtccaagctgaagaacagaaaaaaaatactgaagataaataacaaagacagtgacctgtgggacagtaccaaaagatttaacgtatgagtagagtaaatgcagaaaaaatatttgaagatataatggccaagaatttctggaatttggtgaaaggcacatgtgtgcaaatttcagaggctcagagtaccccaagcagaattaacacaaagaaaaccatacctaggcacctcatactcaaacagctgaaaaccaaaagtaataagaaaatctggaaagcacccagagaaaaaggacacattacataagagaaaaaacaattcaaatgacttcttcttgtaaactatggagacttgaagaccagaagtcggtgatttatatatacatatatgaaacaatatatatctctttatgagtatatatatgtgtgtgtattctttgtgtgtgtgcatatacacacacatatattcatatatctccaaaaaactgccaacccagaattctatagccagaagaaatccttaaaaaataaaggcatttcagtaaaagaaactatgaaaattcatcaccagcagacgttcactccaagaaatgctaagttaagttcctcaaactgtagggaaatgataccagagaaaaattcagatctctggaaagaaataaacagcatgggaaatagtaaatatatgggtaaatataaaagatgaggattttcatcttaatttctttaagcaactgggtgtagcactgtgtgcctatagtcccagctactccagaggttgaggcaggaggattgcctgagctcaggagttcaaggctgtagtgtgctatataacatctgtgaatagccactgaattccagcctgggcaacatagcaataccccatctctaaaaatagaatacagaagactgttcaaatttccaacatgactttccatggattacttatttaattgcaaagaaaaaattcacccataacaatggaaggagctggtggtcaatacatgaatcaagggataaaacatagtttcacttgtaggccacctgatactttacaatattaagtacatgatactatctatgaagtagtcttttgaaaatgtttaatctgaaacccaatcaagcctctaatcataacctccaggtcacagtaaatatagaggacaaagaaacaagttaatcacacctccagaaacaataagacaaacacagcatgtgcaacactatttaggtcaaatctaaagtcttcaaaaagtctatgtcacaaaatgatgaagggtaggctcttgactaaaagagacttaataagccataatcatataaaatatatgagattagtttggttcttggcttgtgaaaaagacagtgctaaaagacattattttaaaaattggagaaatttgcaaatggagtgaatattttaagacattatagggttactgttaatttttttgtgacaatggtgtagtagacatctagaagattatctttgatcctagcagttgtatgttgccttttttttagaggtgaatgatacctaaaacattcactcaaaaaacaggaaaagtgatatatgtaatatatacatatattcatgtgtaataagtatgatatatatatatatgcatctgtgtatatacatagacataagacatgcatggtatatatgtatttgtgtgtatatatgtgttagtatacacataaaaaagagagacatcagatgtactgaaactaggtgaagggcaaacaagccttcactgcaccactgtaaacagctaccttttctgtaaggatgtaaatcttaacattttcataaacttagggaaaacttttccaagttaatatctgtcttttggctacctaactgttcatttctaatttattttaattgtagaggatgcaaaatatgtgttatctgtattataggatttgtgaaaaaatttctttaaaccactctctaattttcaacagctatcctttcattattcaataaatacacattatttattccagcattaatcttcaggggtatgaattctgaatttaaaaatttctcatttaatatattctacaggattttgtccagaataaattatatgaagtgatgatagagcattttcaaaatatcacactcatagggtcttccttctataagatttatttttagtaattctaacaattatcataaaaataatgtatttagtaagcaaatacgatgtgccagatgcctttccaagtatttatattctatattaactagtttaatcttcactatagcatcataatagtgacaacagtaaaaatgtgccatggctaaaggctttccctctcattacattaagagtctctcaccatggtgaaatctttgatgttgactaagttgatagcaatgactaaaggccttaccacattctttgcatttctgtggtttcacaccagtatgaattgtctcatgttgagtaagtcgatcactgcgattaaaggccttatcacattctttacattcatagggtttttcaccagtatgaattctcttatgttgagaaagacctgagatagaacgaaaggccttcttacattctttacatacatagggtttcaaaccagtatgaattgtctgatgataaattagttgagaattaagtctaaaggtttttccacattccttacattcatagggtttctccccagcatgaattgattgatgtgtcttaaggtctccaacacgactgaaggctttcccacattgcttacattcatatggcttcaaatcagtatgaattatctgatgttgaataagatatgaatgaagcttaaaagtcttcccacattctttacattcatgtggcttctcaccagtatgaattctctgatgctgtgtaagttgagagcctctacaaaaggcctttccacaatccttacaatcatagagtttctcactactatgaattctcttatgtttaagaaggcttgagcccttaccaaaagcctttccacattccatgcattcatgaggtttctcaccagtatgacttctttgatgttcaacaagtagatagctgcgaacaaaggccttttcacattgttcacatttatatggtttctcaccagaatgaattttcttatgttggtaaagacttgaacgatgaccaaaagcctttccacattctttacatttgtagggtttcacaccatgatgaattttctgatgcagacacatatgtcgatataatctaaacgtttccccacattccttacattcaaagggtttcaagccaacatgaattttctgatgttctgtaaggtgagaatgacgtctaaaagccttcccgcattgcttacattcatagggtttcataccagtatgaattatctgatgctgaataagctgtgaataaaacctaaaggccttctcacatccattgcattcatagggtttcaaatcagtgtggatttttcgatgtctaataaaatgctggaaaactacaaatgcttttccacattcattacattcatagggtatcacaccagtatggtctctcagatgttcagtaaggtgcaaatattttctaaagcccttcttatattccttacactcatatgatttctctcttgtgttatttctcttatgtagaggaagggatttatgttttttgaatatcatttgactaaaacatcccactttaggtctctgttgtctcccaaattcaattgtgtactgtgggtcagttctgaaaataaacctcataaggttgaaggttttatttcttttccatgtctcctgatggtacgcatttacttcataatttcttttttctgaagataacttgttgctttcagttgtgaaattaaagtctggaagaaaatgaaaaaacaaacaaatgctattttccaataataggggtagggagaggacatctatattaaaaatagtgataaactaaaaagtgtatctgttagtaataaaagagtttagaaaattctaaagtactgccatgcaatttttaaaaggcaagaagggctcagaaaattatgaaagtgcacaggaggatgtaagatttatgagtaggcaaagacaaagtcactagttctcatatttagttgcaaatcagaattaccataggagcattttacatacactatcttttagatatccactcagactgagtggatcagaatgcacaggagtatgtcctgaatatctctattcctaacattatcacattgctctctatataattgtcagtggtttggctttatcttagaatgaaaaccaaacacataaccatgaataaaaggccctgtcttatccacacaaattcatttcaagcccttgatatctgctccctatattgtaccacattgcatcttttcagctgtgagaacacaccacaaatctttcccatctcctggggtgttacatagatgttccacctttcagaaatcctcttaagtggcttctttaaataattggctaactttaagtaaattcatatttttaagtctagattccatttcccaattatttgcctttatactccttctctcaattacatatttactaaatctcatttgttttactacttattttgttaccctaaaacatagcataggtgcaaatcttctttcaactcccattgaaaaacaagtccctaccattggtaagtattacataattcattgtagaatgaaatgttgagttaaaaatgtaaactggatgaaaataaaggtcattggaaaagagagctgagtaaactaaccatttcatttctgaaaattatgtaaaaattatcaggtatctctccctgactccaatctctcactccttattaatcttttacctcacatttactttacaggtgagaaaaatgcacttccaaaatagctcagtcaagaatataagtggaaaaggctgatatgtggccattctgcaataacctgtccccttaaaaatatacatgcctctaccactggtgttcattctttcctttgcatagccatgcttttctgtttctatctcaatcaaagtaatcacgtgttgcattaatttttactgtaatgttttaaataattttttttttaaatctacaaataatgcctgtaaggttgaaggttttacttcttttcattctacacattttcaatctgttgtgtttcttcaatgcctttcccaaattctaccttctattcatttaaagccaaggtggatcattcttgaattctacagaaatgcatctcagtaatttttcaggaattgcacgaattaatatattgaaaggcttatcaaagtcaaagcaaataaacctggggatattgggaaaaataaagtaaaaaatggggcaagagtctaggaaactgagtgcctagtagtttgcaacaaagaatatattggacgtaggctgaagattgataatctgtgtgagggagcagcctttgaaatctaatatgctaaatgggtcaagtattgaaaacaagtggaattctgtgaaaaaagtataaatttaaaaagtcaaaataatacagatgttatcctctgagccaatgcaataaaggataagtagcaatatcaaacagccaaaacacttcctatttataaacagaaagtactcaacaactactcttaggtcaaagacaaaatacaaactgaaactgtagaatttcttgaagacagtgataatggagatactacatatcagaatctatggctttcagttataatgcaccaaggcaaactcaaagattaacatgcttacatctaattaaaaataaaagaattaaaatgaataaatgaagcatttcatttaaaaattagggaaaacagccaggctcaatggctcatgcctgtaatcccagcactttgggaggccgaagcaggcagattgtttgaggccaagagttcaagaccaacctggccaacaataggaaatctaaaattacaaaaattagccaggtgtggtggcacacacctatagtcctagctccttgggaagctgaggcacaagaatcatttgaacccaggaggcagaggttgcagtgagctgagattgcgccactgtactctagcctgggcgacagagtgagattctgtctcaaaaataaataaataaatataaataaaaattagggagacattaggaaaagaatgatggactgcagaaaagaaaaatataatacaagcaaaatttaaataaaacagtagaattaacacatacaaaccattatttcctttatacctaaggaataaaagataggagggaaaatccaaatataatgacaagggggaaatgaccatcaataaagaaataaagaatgttaaaaaaatcatacaactgtgctaatatatttcaaatgtacatgaaatgatgaatcttcctgaaaataaaatttatcaaaagtgacaccagctagacttactggctggcttctagcaaacagaatatgaaaagggaaaaataataactttacagtgaagaaaaatgacggacatcaccttaaacaaatttataaggttaatacctcagcaataaatcatgctgatatcatgtatttctgatacaatatgatgagaaagctacttctctggtattcttccccaaagccgataatcccagtttaatcataaaaaattcaacaaacccaaattgtccggcacttttcaaaatacctgactagtactcttcaaaaagtatcaaggccagaaaggacaaggaaagacaaagaaactgtcacaggtaggaggaaactaaaacacatgatggctaaatgcaatgtgatatcctggattgaatcacggaatagaaaaaaggacagtggaaaaactggtacactgaataaaatctatagttttgctaatagtttgcctatagttttgttaacaatgttaacttgctagtttgcataaatgtaccatgattatgtaagatgttatcattataggaacctgtggtaccacatttgtaacttgtctataactctaaaattatttcaaaatgaaagtaaaacaataacaacaaatagactccagaagagatggaaaatctaaacagaccaatttccatgaaaaaaatagaaaaaaaatttaaaatatttttccccacaaacagctggtcacaattagttagctccctgttggccaggcttcggtctctatatactatttcccattaatgtgaactagggtgccttggagaaatagctaattcctagttcagggagggaagatacaaggcgaatctggaacctcttgtactaaaatgcaaagaagcttttaaagataacagaaaataacttgtgcttttagttatgaaacattaagagggatcagatttccccttttactttatttttatttatttatttatttattttttattattatactttaagttttagggtacatgtgcacattgtgcaggttagttacatacgtatacatgtgccatgctggtgtgctgcacccactaactcgtcatctagcattaggtatatctcccaatgctatccctcccccctccccccaccccacaacagtccccagagtgtgatgttccccttcctgtgtccatgtgatctcattgttcaattcccacctatgactgagaatatgcggtgtttggttttttgttcttgcgatggtttactgagaatgatggtttccaatttcatccatgtccctacaaaggacatgaactcatcatttttatggctgcatagtattccatggtgtatatgtgccacattttcttaatccagtctatcattgttggacatttgggttggttccaagtctttgctattgtgaataatgccgcaataaacatacgtgtgcatgtgtctttatagcagcatgatttatagtcctttgggtatatacccagtaatgggatggctgggtcaaatggtatttctagttctagatccctgaggaatcgccacactgacttccacaatggttgaactagtttacagtcccaccaacagtgtaaaagtgttcctatttctccacatcctctccagcacctgttgtttcctgactttttaatgattgccattctaactggtgtgagatggtatctcattgtggttttgatttgcatttctctgatggccagtgatggtgagcattttttcatgtggttttggctgcataaatgtcttcttttgagaagtgtctgttcatgtccttcgcccactttttgatggggttgtttgtttttttcttgtaaatttgtttgagttcattgtagattctggatattagccctttgtcagatgagtaggttgcgaaaattttctcccattttgtaggttgcctgttcactctgatggaactaccctggaggctctggctgagtactgatatgaatttacatgtgagcaaactaatgaggcaaaggaaagcaccaccatataggggtaggcagaacaatacctgaaagtcaccaagggtagttaggggatagttcctgtttccaccagccaggagtggtaagttggccctaaggctctacaactacttttcccctgaaaaaactccctgattctaagtacagcaggagttaaaagaacagcgtttacaaagaggtagctgagcattatcaaactgaaaaccagcagtgacccatttaattcctggttgtattactgtcatcagcctgcattctatcagactaacagaggaaaacataaataccctctggtggaagatagcatcatctgaaacctcttcagttattttatatgcaatgcccagcatacaatcacaactactagtaacttgaagatgcattaacaaatgacaaataacaagattaaaagaaagaaacaataaagaagcagacccccagatgatacaaaaaatgaggcataaaagaattaaaaaattaactatgattaaaatgttccaagaaaacagatgaaaatttagtaataaaaggaaagcaaataaaagaatgaagatttcaacaagtatttggaagttataaaagagaattaaattgaatttctggaactgaaaaagacaatatctgacatgaaaaacccctctttagaaaacagaataagtgagctggaatacaggtcaacaggaaacattcaaactccatcatatgaaaaatagaggggaaagagaggagaaaagcagataaggacatgaaaaagttgtgggatatgctcaaaaggtctaacataggtgtaattaaagtcccagatgggaggagagaatggtcacctatcttccaaaaactgaacaaagactgccccttctgcatggaatctatcagatcactggaagccaacaggccaactgctagaactacaaaaataacagtaaaaaagagaataatcttaattcattctactactataaaaattatggaggctcttttgtggtaaagagaaaaccatggttttttatgtaggaagattagcaattaaagtatttacagacattctgaacacacatataatttaaaatttgtttttgctgatagtgtctttgcagaaaaataccagaattcaaacctctagtcatttagaaaaagaagtaattataggacagggcagaggcaggcataaaggcaagtgaagaatagtgaagattcaggtgctgaatgggggtgcccattccacctaacaaacttcaaatatgcccatttccacctaacaaactttgagaatatggagcagaaatgtagctggtttcttggcatagaccataaaatatacaacagagaaggctgatattctagagagcatattgtacatcattttgtgcagatattcttacccaatgagaccaagttagtataattctccaacatcacatctctgtacaaatccctctgatccgagtttaaatattcccactcctcctgagagaagtctatggcaacatcgctgaatgtcaatggcacctgaaatgacaaacctgtgtattatttgtaaaagtaaagaagacttttcaagatggaacattaaattgcaataaaggggcaatatgtaaaaagaagtagtctagagttacaagatgatgacatggttagataagagtaaataaattagcatgtcttaagtagagtgcccacacaatcttaaggaatcctgttggagcacacaaaattttcttagtaatattagagaaaaatccaaatatataaaaataaatgaagtcaccaaactttccaaattaaatagtatatataagcacaataccttctacgtacctaagccatataatattaataaatacaagttgttacagcttttctcttcgaggaatatgaaaaaccatgaattgataactaccccctcccccaattgtattataaaatcttttccagccaacacggaataacagggattgaatttaccttcttgtatgaaacaactgaaaatctgaacaaaatatattaaaccatggttttcaagacagaaaacattgcgcaatgatacctgaaagacaagtaacaaatgaggtgaaacctacagtcacactagtttactgtaaggagacaatttctaggctgtggcacagggagcgggaacctaagcaaagcccactggattccactgagaacaagaaaagtacaaaccaatatccatcatggacacagatgcaacgattccaaacaaagttttagcacatcaaatctaacagtatataagaaagggaactctattatgaccaaggctcaatccaagcctgtctcacatttaaaaatcaatcaaggtaatgcaccatattcacaaactacaaaagaaaaaccgtatgaacatatcaatagatgcagaaaaggcatctgacaaaagccaacatccactgctgatatccttggtgaaacaagaaaagaagggaacatccttaacccaatgaatgacatctataaaaaacccatagctaacatcacatttgatagtgaaaggctgaatgctttcctccccaaatcaggaatatagcaaggatatctactctcaccacttctattcaacattgtactagcggttctagccagtgcaactcaggcaagaagaagaaataaaaagcatctagattgaaaaagaagtaaaaatctctttattcacagataacatgattgtctatatagaaaatctaatagaatctaataaaaattcattaaaactatcaagtgagttagcaagctgagaagatacaagctcaatatgttaaacataaatggcattttaattagcaacaattggtggaaattaaaattaaaaatactgaatatcaaatgaaaaatataaaatacttaggaatcaatctaacaaaagatgacaatactaatactctcataactacaaataattactgagaaaaaacttaaaagatctaaacaaatagaaagctataatatgttcatcagtcagatgactcttacctttgcaaacagatccacagattcaacaaaatctcagtcaaaatcccagcagaggccaggtgcgatggctcacccctgtaatcccagcactttcggagggtgaggcaggcggatcacctgaggttgggagttcgagaccagcctgaccaacatggagaaaccctgtctctactaaaacatacaaaattagccaggtgtggtagcgcatgcctgtaatcccagcttctcaggaggctgaggcaagagaattgcttgaacctgggaggtggaggttgc[132 bp omitted]gaaaacacaaaggatctagaataacctagacaacattgaagaagagcacagttggaggatcaaccctactaattggaaagcttaacgtaatactacaataataaagagtatgtggtgtttgcataaacgtagacaaataagtcaatggaacagagttgagaaatagacctacacgtatctagacaactggctttaaacaagtgactaaaggcaattcagtggataaaggaccgtcttttaaaaaaatggtgtaggaacaactggatatctatatgcaaaataaattatccataccttgtaccatatgccaagattaacttaaaatggcacatggagataaacataaaacataaaactatagagcttctatgagaaaacacagtataaaaatctacataagcttggggtgaggcaaagatttcttagatacaacaccaacagtacaatccctaaagaaaaagtacaatctgtaaagaaaagaaaaagctgataaactggatttcatccagaaatggaactctcatacactgttggtgggaatgtaaaatggtattatcactttgaaaaattaaaaacttctgctcttcaaaattcagttaaaagaatgaaaaaatggccaagtatggtggcttatgcctgtaatctcagcactttgggaggctgaggtgggaggatcacttgagcccaggagtttgaggctgcggtaaaccttgataacaaaactgcactccagcttgggcaagagagcaagaccccatctctaaaaaaaaaaaaaaaaaattaaaaagaggctgggcattgtggctcatgactgtaatcccagcactttgaaaggctgaggtgggcagatcacttgaagttaggaattcaagaccagcctggccaacatggtgaaaccccatctctactaaacatacaaaaatttgctgggcatggtggcaggtgcctgtaatcctggctacttgggaggctgaggcaggagaatcgcttgaacctgggcagcagaggttgcagtgagccaagataacgccactgtactctatcctgggtgacagagtgagactccatctcaaagaaaaaaaaaagaatcaagtgacaagcaccctcttattagattcatctttcttaaggtattaaggcactattattaaaaataatattattgtataaagaattatactaatatggcatgtatgttggacacaaattccaacctcttccccatagttcaatatcatctaccacatatcattctagttgattttcctttctacaactctttatagatctgttcctgagttggaacacagtaatgcagaatgatccagaacaaccttgattccctcaggactgtcaatttctcttccactacaaaatgggaccctggaattgttttcatttctcagtgatcccttagctagatccctaatctctctctaggtaagtgataatcccatcttcactcaaacctaaatgcgtttcaaagttgagatctcatctcaaacagactgagaccactcataaccaagttttcccttatctaactgtggagataagggagctgtggagaaagtttccactcctgtagtcaaataggaccattgttcctatgccacgaaaccatgaacctgacaacggcagctcaactatttcaaggtacttcactctttcactgctctaacactgctcttgagagaagactgaacacacagaagatggatgaattatttgaaaataagtgaaaatcagttcaaaaaaggagggcaaatgaggaggacatcatccatcactggaatgggaggaatgtgaaataggttccaagagagagctttctgagataggaggtttcaggattaaaaaaatgaaaatattacatgaattaaaaaatcacaataagtcagaaaagcaaaagagacatcaactcacccgggccatggtttcagaaatgctagttctcttcaggtttcctctatcagagaagcagagttcagagaagccaaagctaggtaatcaaggcatcacctgccaaaagatacgtaactttactaaagagatgtttctaaacaataagatactgtcattttacaggtatttagttgtcacatttaaaaggttgatgatgtaccacatattagtgaggctgtagggcaaagtgcattctcatggtgtcctgtagacttgtgaaaatcaagggcattaatacaggtaagcaaatctctgcataagaacttaaccacgaaaggccatttctgagactctgtccaaaagaaataattataaaatgtgctcgaagatgtataaaagaatgtgatgatacatattagttgtaatgaaaaaagctggagaaaaatctaaagagacatagacaggtagttaattaaataaatgactgtgtattcacataatggaaaataaggtagatattaaaaactattgtgtagatcactggttctgaacaggcagtgaatctgttcttaagagaacgtttggcaatgtctggagacacatttggttgtcataatgtaggcagaggtgttaaggtatctagtggaaagagaccaggtttgctgctaaacaatgtgtgatgcacaggaaagtccctaaaacaaagaattagctagccaaatatgtcaatagtgtcaagggtgaaaaaccctgaagtagactcattaaaggaagataacgtaatccagagtctctataatatataatagattatgccaacacatgataactgttaaacacaaaaaaacaggaaaaagttactaatgagcaggagaaaaaaaaatctcaacagaaacagactcacaaagaatccagatatgggaggtagcagacaagggcttgaaaatatgattaacatgctaaagaaaagaaaagatgagcaaaatggattgcaaaatggagtaaatcaatagagtatcagatctgaaaagataatcacatgaatattttagaattacaaaattaattaagagcttattgcggtggctcatgcctgtaatcccagtactttgggatgtcaaggcgggtggatcatttgaggtcaggagtttgaaaccatcttggacaacatggtgagatcccgtcactactggaaatacaaaaattagccaggtgtggtggcatacgcctgtaatcccagctacttggaaggctgaggcagaagaattacttgaactggggaagtggaggttgcagtgagctgagatcgtgccactgcactccagcctgggtgacagagtgagactccgtctcaaaaaaagagcttattatgcaacattaagtcaaatttacaataatctttctttcaaaaaatcctctatgtctattattattattttagagatggggtctggttctgtcacccaggctgtagtgcagtggtatgagcataactcactgcagcctcaaactgctgggctcaagtgatcctcacacctcagcttcccaagtagctggaattacaggtataaggcactgcactgagcctcaaattaacaataatcttatgcagagagaaaaaaagagaacacaattgaaaagaaaaatgcaagaaacagtgaaaatgtgacactgaacatctagaagaaaataagagagaatgggacagaaaaattatttaaagaaataataaacaaaaacattccaaatctcaggaaataccttgatatacaaatcaaaaaagttgtcaaacctaatcaaaataaaatgaagaaattcacacctagagatatcatagtcaaactgctgaaaaacaacattgaaaaacataatttaaaaccacattgtttaaaaaaaaaagctgtcagctataagaaaacagtaagaaaaatggttgacttctcactagaaactatagtagcctaaagaatggaatttatatctttaaagtgctgaaagaaaaaaactgagaactctgaattttatacccggagaaaaaatttttcagaaataaaggtgaaataaatacttgttgaaacaaatgctaagataattctttatcagtagacccacaatataagaaatactaaaagaaagcattaggctaaaggaaagtaatcccagatggaagcatgaatatgcaaacaagcaatgaacagctgtagatggagtaaagacatgactgatatgactaaacaaatgaattatttaaagcaacgaaaataataatgttttatggggcttgtaatataggatggaggaatgacaataatagcaaaaatggtgagcaaggaggttaatggagttaacacattaacctctattaatgactattgaaatgcccttacactacggggactctattaaagatgcacattatattataatatcttggcagccaggagtggtggctcacacctgtaatcccaggactttgggaggctgagatgggcagatcacctgaggtcaggagtttgagaccagcctggccaacatggtgaaactccgtctctactaaaaatacaaaaattagctgggcttggtggcgtgtctgtaatcccagttacttgggagtctgaggaaggagaattgcttgaacctgggaggcgcaggttgcagtgagccgagactgtgccactgccctccaacctgggcaacagagtaagaccctgtctcaaaaaataaataaataaaacaaaagaatgtacaa[144 bp omitted]tcttctaaaaatacaaaaattagccaggcatgatggtgggtgcctgtaatcccagctactcgggaggctgaggcaggagaattgcttgaacctgggaggtggaggttgtagtgagccgagatcgagccattgcactccagcctgggcaagagcgagactccatctccaaaaaaaaaaaaaaaaaaccaaaaaacaaaaaacaaaaaacaaaaaaaactgacagaggagatgaaatggaataataaaaaaaaacttaatttatacaaaaaaatcaggaaaagagcaattaaaaatataaagaaacagaaaacatatagcaagatggcaggcttatattacagtaaatataaattatagtatattactacagtataatttatacttatactaattatagtaattatagtaaatacaaatgaactaaccattgcaattcaaaactaatattataagattaggttaaaaagaaaaataggatcaattaggctgcttacaagaaacgttctctaaatataaagacacgtgtttaaaaaaatggaaaaaatctatcaagcagtattgcgaagaaaacagacacagctatactaataacaaataaagtagattttaatgcaagaagtattgtaagtaataaagagggtcatattctgcaattcagcaagaatacaacagtagtcctatatttgtatgtacctaataacatagtttcaaaaaatataaaataaatgtcaacagaattaaaggacagacaaattttaaagttagagatttcaacactctctattggtaactactaataggaacaccaaaaaaagaaaaaaaaatccacaaagccataaaagtgtgaagaagattaaccaaattgaaccaaatgaacattataccaaactgcagactacacattctgttcaaatgattacatcacatttatcagaataacattctgggctataaagtaagtatctataaattacaaaggattaacataaaacaatgtatattttctgagcctttacaattagcttagaactcaaaaagaggcagttctcaaatgtttccaaatacagacatactgtggagatattgcaggcttggccccagaccaccatgctaaagtgaacattgcagtaaagtgaatcacatgaattttttggtttcccagtgcatagaaaagatatgtttatactgtattattcagtgtgtaatagcattatccctaaaaaatacggtgcataccttaatttaaatatacttcattgctaaaaaatgctaatggtcatctgagccttcagagagtcataatctttttgctggtggaaggtattgccttgatgttgatggctgctgactgatcagggttgctgaagggtgggatggctatgacagtttcttaaaagaagacaataatgggccaggtgcggtggctcatgcctgtaatcccagcattttgagaagctgaggtgggtggatcacaaggtcaagagatcgagacaattctagccaacatggtgaaactctgtctctactacaaatacaaacattagctgggcatggtggtacgcacctgtagtcccagctactcgctcggcaggctgaggcagaagaagcgcttgaacccagga[132 bp omitted]ttctctgtagcatgtgatgctgtttgatagcattttacccacaggggatcttttttcaaaattggggtcaatcttttccaaccctggtgctgctttatcaactaagcttgtgtactattcaaaattgtttgtttttatttcaacaacattcacagcattttcaccaggagtagattccatctcaagaaaccactttaattgctcatctgtaagaagcagctcctcatccattaaagttttatcatgagattgcagaaattcagccacatcttcaggctccatgtctaattctagttctcttgctatttttgccacatctgcagttacttcctctactcaagtcttgaacccctcaaagttatctgtgagggttggaatcaacttcttccaaactcctgttaaacattttgacctccttctatgaatcaggagtgttcttaatggcatctagaatgttaaatccattccagaagcttttcaattcactttgcctagatccattagagaaatcacaatctatggcagctagagttttatgaaatgtatttcttaaaaaatgaaacttgaaagttgaaattattccttgatccatgggctgcagggtggatgttgtgttagtaggcatgaaagcaaaattaatcttttccatacatccccaacagagctcctggatgaccaggtggaacgtcaatcggcagtaatattttgaaaggagtcttttttttcctttctgagcattgggtctcaacagtgggtttaaaatattgagtaagccatgccataaacagatgtgctgtcattcaggctttgttgtcccatttctagagcacaggcagagtagatttagcacaattcttaagggcgctagaattttcagaatagtgaatgagtatcaccttcaacttatagtcaccagctgcattagcctctaataagagagtcagcctgtcctttgaagccaggcattgacttctctctagctatgaaagtcctagatggtatcttcttccaacagaagactgttttgtctacatggaaaatcttttgtttaatgtagccaccttcatcaataatcttagctagatcttctggacaactggctgcagcgtatatatcagcatttgctgcttcaccttgcactgttatgttatggagatgacttttttccttaaacctcatgaaccaacctctgctagcatccaacctttcttctgtagcttcctcatgtctctcagacttcacaaaattgaagacagttaggtctttgctctggctttggcttaagggaattttgtggctggcttgatcttctatgtggaccactaatctttctctgtattgcagtatctccatatgactcgagaagcacttttcatttccttcaagaacttttcctttgcattcacaactaggctaactgtttggcacaagaggtcaagcttttggcccgtcttggcttttgacatgccttcctcactaagcttaatcacttctagcttttgattaaaagtgagaaacagaggactcttcctttcatttgaacacttagaggctattgtagggctactaactggcctgatttcaatattgttgtgtttcaggaaaacaaagagaggaagagagacaggaatagctggtcggtggagcagtcagaagacacataacatatattcattcagttcaccgtcttatatgggtgtggctcacggtgtcccaaagcaattacaacagtaacaccaaggaccctgatcacagatcaccataaaaataatggaaaagttttaaatattgctagaattacaaaatgtgacaaagagacacagaatgagcacatgctgttgaaaaacagagacaatatacttgctgaatgcagggttaccacaaatctcaatttgtaaaaattgcaatatttgcaaagtgcaataaagcaacatgcaataaaatgagatgtgcctgtgtaaaaggcatacttctaaatagttactggtcaaataataaatcaatggaagctagaaaatattttgagttaaatgatagtgaaagtaagatatatcaaagcttgtgagacgcaggtaaaccaatgcttatgaagatataagctttaaatatatgttttgtcaaaacagaaaggttgaaaatcagtgatatacatcaagaagcttgaaaaggaaaagcaaattaaacctatagaaagtataacataccaaaagtaaccaataacacaaaaaaccccagatatacaataaagaaaaatcaataaagccaaagctatttcattgaagagattaataagaataataaacttctagttacactgatcaagaaaaaattgccaatatcaggaatataaaagaagataacactacctattttactacatacattaaaatcagaattgtatgaacaactttataactttctaataaacttgaaaatgtagatgaaattttaaaattccttgaaaacacaatttgaactgatataagaaattgaaaatctaaatattgttttatttattaaagaaattaaatctgtattaaggatcttctcacaaaaataatgtcaggccaagaggattcagtagcaaattctcccaaacatttaagaaattaaaaatgccaatcaaactcaacttgttctagaaaatagaaaaaaacaaactatgtcataaggccagaataactgtgatatcaaaaccagatgaggatattacataaaaggaaaattacaatatatctgtttcatgaacacagacgcaagcatattaaaccaaatattagcaaagagaaaccagtaacatattgaccaagagagctttattttagaaattcaaaggccatttaatttaattttttaccataacctcaaacaagtataagtttaatttttaaaaaatcaatgtaatctttcaatgttaactaataaaggagaaaaccattcaattatttcattagaaataatccatttaacaatatacaacattaatcatgataaaaattctcagcaaaccaggactagaggggaacttctttcatctgataaaggggacctaaagaataaaaactacaactaccattgtacataaagggatcattatacataatatggaccactgtctttctgatttcaggaacaaggtaaggttgtctactcttacatgtcttttcaattttgtagtagaagacctatccaatattataaggaaaaaataaaaggtgtaaatggaaggaagtaaaatgatctttatttgcagatagtgtagattacatgattatgtacataaaaatattttttaattccacaagctttaaattaaataatttattgctgaataaagggtaaaagtataaaacaattatattaaagcaaagctactgaaaaataaaatttttaaaaccttaacagtttgtaaaaacataaaaaatgtaaaacaggaataaatttaacagatgtgcaagacctttagacaggaaacaacaaaaccttaaggaaagaaattaaagatgaattcaataaatggaaatgtattccatgttcatgaactgtaagactcaattttgagataattctctctaaatttatctactgattcaatgtactgccaacaaaatgtcagcagggcgttttgtttgttttgagaaaattaattaactcattctaaaattatagagcaatgcaaagaacctggaatagacaaagtgattttgaagaacaaagttgttcttcaacttatattaccagattatcaagatataatataaagctacaggaattaaaatggaggtgctggcacaaagattgacaaagaggaccaacggaaaagtagaaagactcctgcacatatatgggcccatgctttacagtaaaagtctgactgcagcttaagagaaggccagtgtttttaacaaacggtgccagtgcacttggatatctgtatgaaaaaaatgattttgaacttcatcccactacatacacagatataaattcaagatggatcataggtctaagtgtgaaaacaaacaataaagattctggaggaagaaacagaaaaataactttgtggtcttgggatagataaaattttcctttttttttgttttaacttttaatttccacttattttagacttagagaaaagttgcaagagtagtacagagggttctcatatacccttcattctagcgtttatcttacataaccaaaggataattatcaaaaccaggaaattaacattggtacaatacgaaaaatttgcacatcttattcaaatatgttttcccattaatgtcctttttcttttccaggatcccacacattaatctacgttgcatttagctgttatttctctttagtctcttccgatctccttagactttcttactgcattaattttcagttgctaccataaccaattaccacgaatttagcttaaaacaacataaatatataaaatctcacagtttccatggacctggagtttagctgggtgctgtcctcaggctggtctcacaggctgcaaacgaggggttacctgggctgtgttctcctctggagttcaactgggggagaattcatttccaggttcattcagattgtagggagaattcatttccctgtggccatacgactgagggcctcacctttttgctgactgttggctggaggttgccctcaggttctgcaggccacctgcagttcctttgcaagatgggcttctccaacattgccacttacttcatcaagcccacaaaagaagtccaatctgctatgagtcttatatggtataacataatcacagtagagacatctcgtcacttttttttttcatatgataggtttatttttattattttaaggaaccttcatactgttttacataatggctataccaattgatattgccatcaacagtgtacaagtgttccctttcctctacatcctcaccaacacttatctattttcttttcttttcttttttttttttgagacggagtcttgctctgtcacccaggctggagtgcagtggcgcgatctcagctcactgcaagctccgcctcccgggttcacgccattctcctgcctcagc[198 bp omitted]atcctaacaggtattgtggtaacatctcattgtggtttcatttgcatttgtctgatgtgcttttcaggtaccacttaaccatttgcgtgtcatctttggaaaaaagtctattcaagtccttgcccatttttaaattggattattggtttctttttcttcaaaattaattaattcatttttattttactttaagttctgggatacaggtgcagatgtgtaggttttttacataggtatatatgtgtcatggtggtttgctgtacctatcaatctgacatttaggttttaagccccacatgcattaggtaatttgtccagtgctctccctccccttgccccccaactccccgacaggctccagtgtgtgttgttcctttccctgtgccatgtgttctcattgttcaacccccacttatgagtgagaacatgtggtgcttggttttcagtttctgcattagtttgctgagaatgatggcttccagcttcatccatgtccttgcagaggacatgatttcattcttttttatggttgcatagtattccatggtgtatatgtgccatattttctttatccagtctatcactgatgggcatttgggttggttccaagtctgcaattgtaaatagtgctgcaataaacatacgtgtacatgtgtctttatagtagaatgatttagaatcctttgggtatatacccagtaatgggagattcctcaaggagctagaaccagaaataccatttgacccatgacttttgccatataaattaacctaatgagaggagtgacatttcctgacctttgccattttccactgattagaagcaagtcaccacctctgctcatactccaggggaggggactaaacaaggctgtggactccaggaggtgggaatcatggggccacctaacatctgcctgtcatacctatcttcatgtcctttcaatttggaagagtaccaataatttattctgtcaaatttccccccgctgggtttgtatgatgtgtttttataactgaaatgaggcatgtattcttggcagtggcacagtaatgatgctgtgtctttcacattgcatcatcatgtccaagggtgcatgatatcaatgttttattactggtgacattaaccttcatcacttggttaaagtgttttctcctgtgttttccttctgtacattactaccttcccatttgtagttaataaacatcttgggagggtaatactttaacactatgcaaatcctctttctcctcaaactttcacccactaactttagcatctcttatcttggtgtccaatgtgaggatacactgcagctcccctatgtacataagttctgctaataaacactttgaattggtcaccctggtattgctgtttctttctttggaatcccaacagccccatcctgggatggtttggggcagtccctttagggaactcccctgccactgcttttggggtgactccagctgagtgttcagcaggacaaaataaggttgtttctggtatttgactactatgaataaaacttctatgaacaccctttacaagtctttgtgtggacatatattcttgtttttcttgggtatatacctaagggaggatgtggtttacctagtttatcagactgcaatgtatataaggtccagttgctcctcaaacttgccaatacttcgtgttgtcagacattttaactttagctattctggtgcatgtgtagtggtatctcattgtgatttttatttacattttcctgataatgatgggaacaccttttcatatgatattatctattttgatatactattgggtcattcaactcttttccccattttttaatttgatttgtcattttcctattgatttctaggaatttataaatgtattttgaacacaagtcttttgtgtgtgtatacagacataaaaaggagggtggaggaggagagggagggagggaggaagggaagggagggagggagagggagagggagagggaagggagagggagagggagagggagagggagagacagagagagagagagaggaaagagttgcctgtgtcttcttattcactttcttaatcatgtcttattataaatagatgttcttaattttaatgaaggcccatctacttaggtatgtccacaataaatgggctgggttatgaaatttataagagggcttaagaaatttggctcaggatcacagctagcttctgtgtgttgtgcaacacattctgatcttccagtgtttcaggccataacctacacaacttcactagtgcctgggaatgttcaaggccttggcttgggttcaaacctgcagggaaaacatgcagctgaacaggtcacagagagatcaaggcgctctgtgaaacatagagagcgagggaaacttggggaacctacaaacctatcatcatgagaatgaataaaaaattgtggtgtggtcatataaaggaagattatataacaattgaaaaaaagccctgttgatttccaaaacaacatgggtgaattccagaagtaccagtttggatgaaaaaagagagatacaagagattccatttatatgaagttcaagaacacgcaaatcttatcttgagtgacaggagtcagaatagcacttactccttatgggagaacagtggattctaactaggacaggacacagaaaaatcctctaaagcagggcacagaaatcttctgtgtcttcatctggctggtgagtacactgatcctttcaaatacaaaaattcattggattatatatatagctaagatgtgggcaccttattgtatatgatacatgcttcaataaaaagtgatgacagaactttatttgatgataatgagtaaaaatattacattacaaactgttattctgttatggtgggtaaaataacacatatgaatatatgcatatgccttgagggatggagatatacatatatatattgtgtgtgtgtgtgtgagacagggactcactctgtcactcagcctggaatgtggtggtgcaaacacggatcactgcagcctcgacctcctgggttcaagctatgctcccgtctcaggtggtggcatggacctgtagctgggactacaggtgcatactaccagacccggctaatttatttttagtaaagatgagctctcattatgttgcccaggctggtcgcacactcctgggctcaagtgatccttctgcctcggcctcccaaagtgctgagattacaggcatgagccaccgtacccaaccaaaaagatctggagtaaaatgtttacagttgttgtttcctcactttgggtttttctgtattttctgaactactatatgagaatgtattacttttatagtaaaaaatgataatagagctaatcaatctaatattagagaatgtaataaaataagttatgaatacagtgatatttggagtacggtgaggaggccttgttttctcccaagtcctaaagtctttgagttgtctcaaattagaatatcaaggctctgagttttgaatactgatatacaacagttttccttttactggttttccctaagtcacttggataaatcctcttgtcactacactctccacctatgaggactggactccctgctccagttcaggaattgcacctaccttagaaataagccattttggttaaaaaatcaattgtttccaacatgcaggaaatatctgcatatgaaaaaagaaatgggactttggcatgctgaggcttttgaaaaattccagtacaatcctgtggcagagaggttccatacaagaaaggccaaatgaaagccacccgagggaccaagaaaatgatgcttcaaggaaaacagaatggaatgatcaatgaatctcaaagaaatccttcataaattcaaacactccagggcctctctagagggtcacattaagggataaaaaagctctagaaatcatattttgaatttaaagagttgatcataaagagtctgctcctgtagcttttcagtatcacaatcatttacaagtccgtctgaaatagtgcagtgatcagtgctccacacagtagaggatgctgccacgttctcagatgttactatctctgaaattataaagactgaagttcccatgtggcccagaggaatagaaagaagtgagctgatcactctatgaaaggagaacagcatgtagaagcaggcattctcaccattctgagctcagcaacagctgattaattaaatatgtaacagggcatccatataatgaaatattaagcaaccatttaatgctaagtttaggaagctgtttaagggaataaaaacattcaagttacattgtcagtgaagaaaattaggttacaacttttaaaaaagcaattaaaaagggggcaaagaatttgaatagacatttctccaaagatgtacaaacggccaataaacaaaggaaaaaatgctcaacaccatgagtcatcagagaaattcaaatcaaaaccacaatacccacttcacactcatgaggatgacaataataaaaagaaaggtaataacaggtgttgctaagaatgtggagaaactggaaccctcttacgctggggggaatgtaaagggatactttcgataataatctggcagttcctcaaaagagttaccatatgacccagccattccacttctaagtatatatctaagagaaatagaaacatatgtctatacaaaaacttgtacacaaatgttcacagcagcattattcataatagctaaaagtagaaacaacttaaatgtccattaactgatgaataaacaacaaaaatgtggcatattcatacaatggaatattattcagcaataaaaagaaacaaagtactgatatatgctacaacccagatggattttgaaaacgctaggctaagtgaaagaagccagtcacaaaacttcacttattatataactctattcatatgaaatgtccagaagaggtgaattcagagacagaaagtagataaatggttgtctatggctggggaaaatgcagagtgagtgctagtgggtatggaatttctttttgaggttatggaaattttctcatgttgacagtggtgatggttgcacaactctgtgaatatattaaatacattaaactgtatactttaaatgactgaattttgtggcatgtgaattatatgttaataaagctgtttaagaattgggttacgggccgggcacagtggctcatgcctgtaatcccagcactttgggaggctgaggcgggtggatccatgaggtcatgagatcgagaccagcctgaccaacatggtgaaacctcgtctctactaaaaatagaaaaattagctgggcgtggtggcatgggcctgtaatcccagctactcgggaggctgaggcaggagaattgctcgaacctgggaagcggaggttgcagtgagccgagatcgcgccactgcacaccagcctggtgacggagcgagactccgtctaaaaaaaaaaaaaaaaaaaaaaagaattgagttacaaatgtatacaattatgcaaatgtaaatatgattacatttataaaatatatgtatttatcaatatatagagaaaaacggacagacatcaataaattgaaaaaagtatggaaaacataaacccatatattaacttacttaatatttgttttatagtcctgggtttctgcctattcctaaaagtatatttcataaaattaaaactttttttaaaaaggcaactatcttacttattcctattttgatttattcttccttactgggataccaagtcatttgaggatagcaactatatctttttgtcttgagacacagttagatagatttttgaatttttaacagagcaatcttttctctgaacaagtgggaaaaaatcctccctgccttaccttttaaatatcttttgatctggaggagaaaacttagtatactctagaacaaaggtcctctaaatatagtccctgggaacttgttaccaatgcagattctctgctctacctcagacctaccgaattagaaactctggggctggggcccagcaaactgtttgaacaagccctgcaggtgattctgatgcatcctacatttgagaaccagcgctgctctaaaaactgctgctgtgttttattgaaagcttttactttattttcatcagttcccattacctgaacccaccctatgattcgtttgcctgtagaaatgtatgtcaatgtaaatcggagactctgatatttcgtatgcattactggtagtctcaaagctgcttcctattatacattcctgatagatgggtttattttacttctgaatctatcctcctaatcacagtgtcctacaagcagctgttaagacatcgtgttccatttaatgtcactttgcatttaacatcattagaataaaaactctaaggtataagatccattttctttcactgagttctcacagttcgatcatatcctgacaatgctgctatagccagaaagatgcctcttccctgtgaactcccaagacaggtcatctgaatttctctagtggcctttcacatcaactatctttcttatccctattccgatttcattttccttactggataccaagtcatttgaggatagcaactatatctttttgtcattgtatcctaacaagtacaagcacatggtaaatatctgatatttgactcaaattttgaaactagggtttatcctcagggaatggctataaaaggaagcaaagatctctgcaaaatggtgttcattatagactagtttttagtcaacaattagaaacataatagctcgcagtaggcaaaaggttaaataaattatgaagagaagggcttaagggccttgaaaggaggctgtaatggcatattcacagatacgtcactgttaggcaggacatttccaaagagaagaaagggtctcatgtctttaaaattaaagagcatcttacaagtaatgaggaaatataaactcacctggactttagctttcagatgtgtagcaaaaattctttcctctttcaggatcttttttttttttttttttttaacagaagggtagcactggaaaagagaaggcaatcatgagacagctggggtttcttggatagcacagtaacttagaaaataccctcaatgatcatacctgctcacctacttcaccgagcacaaccagatgggagtaggagagaaactggaacagtgttgaccttcccaatacaagagaggccaagatcagtgatgcctagggtggaatctgtctctaattcacagcaggttcctggggctggagctttagaaatgctatggttacaaacatagagctggctcctcggcgcttccaagggggaaatatccaggagggatgcctattcctgagaactctttatcgagtcttctcagagcctgccttgaggccgcaaccaatttcaaaaatctcgtctcaagatcaagtctgtgttttcttgctgggatccttcacgcctccatgaatctggcttctctcttttacctgctgcacatcccaagtgtctgtgaggcgatagggctgaggaatctgcagagcctagagcctggagtcacagtgacaattcacacaggtacacaacactgttcatttgtctaacgcacacacacgtacacaaccctgttcattcatctcacacacacacacacacacacacacacacacagtctctcacaggcacacagaaactcctcctctgctgctcaagcagacaggcctgaaattctactgaaactccagggatgacacgccccgttcacgccctgggtcttctggtcttcagcgcctctcatcctcaccgccggttccattccaaccagggactgtggaagcctccgctgatttctgtggagacgatctactcaccacgtaggggctacagcagctcggacaccggaaaaagatctagagctcgagggtgaccctagcgcggtgacttctgggaaatgtagtccacccggaataaccatgtccacggcgcccgccattctgtagcctatgctcggagggcacatgagcaagagcttgaccatctgtaccgttggttgacttgctctattaagggctatgatttcaggtcgtcctgcgtgtttagaggaggcgagtggaatcttgagtctcggctggagaaggcagagcacgggcatgcagacctcaaagcctcaaacctgcgtgtgagaggagaagttggcgagctccagcgtatggtccacggttggtattctaggtgcgagctgaggacaggggcttttgtttttcgcgctcccaggtagcgccagcacctatagtagctccaggagcacagaaggcgttaagtgtgcattggttttagagaaagaatgcctgtgcgttttgtgttttcactctgtgacattgtgaaattcattgtgtgagaacatggatggggttgtattccggattatggtttgtttctaagtgtgttactttggacatgaaatggtttgtttcagattttgagattatgtaaattttttaagccctctcccttcactcctactcccactctgaaatttctcatgcccaattgccattctctcacttaaaatacgagtctggctgatttgtccaaggtaaatactactatggcctacttatccattaggctgaatgggcaaagtaccgagagcccacagaaatgttttctttcaaaataagaaaatgaattttaaggtcaaagaaacttaatatcgtagtctactggcgagtgtataaattgatataatcacttgggaaaactatttggcaagatctattgaatttgaatatatgcatttgctataacctagcagttccattcttacctttaacccaaatgtaagtgtatacatattcaccaaaatacatgaatggggatgtttgtggcattgccatttttattggaattgcactcaatatatgggtacttttcaggaaaattggtattttaaacattgtgaaaaggctgggcgtggtggctcatgcctgtaatcccagcactttggggggctgaggtgggtggatcacttgaggtcaggaggtcgagaccagcctggccaacatggcaaaaccccgtctctagtaaaaatacaaaaattagccaggtgtgggggcccgtgcctgtagtcccagctacttgggaggccgaggcaggagaatcgcttgaatccaggaggtggaggttgcagtgagccgagatcgtgccactgcactccagcctgggagaaagtgtgagattctgtctccccctacaaaaaaagaaaaagaaaattgagaagggacctccaggaagatggaatagatgtacttttttctatttgtccagctaagtacaataaaaaccctgggcattagttataaaaaaagagaaaaagaacactgagtggtagagaaaaggtagactggtgctgagttcccttgattttctttgtgcctcctttgtgccagacttaaagccaaagaagctagcagtcccaatacaccaatgggcacagacaaaaaagtcccagcaaaagcctgctgtctttagccaaaagacaaggaagagggcagcctagcaagaaggaaaacttttagacaattactgccatgctctagtcaaaacaccacaggaaaaaccttcagcactatccccagcatgccagcaaagacccatgcttccactcttgcctggagagttaggactttcctccccacccctcaacccagtgctaacagtagaagccacatggagtgcagtaataaggcactcctttccctccaaattagaaaggtatcagtggaggtctagtgggaaaccggaactcccacccctgccactagtaatgaggagcccccctgtgggtatcaatggaggctgagtgggaaatctggatttctgtcaccacctaataataatgaggcaggatccacttcccctaccacagtgatgtcagaggagaacaggtgatataaactgaattgtgtactccactccctgagttcatatgttgaagtcctaactctcagtacctcaacatgtggactgtatttggagataaggtctttaaagaggtaattaaggttaaatgaggtctttggtgtgggccctaatccagtatgactggtatccttataagaagaggagatcaggacacagatacacaaagggtgtgtgaaggtagcacgtttaccagaagaacatggccatctacaagccaaagagagagacctcacaagaaacaatactgctgacaccttgatatcagacttctacccttcagaactgtaaggaaattaattggtgttgtttaagctgcccagtcggtggtactttgttaggtatgatccagagcctcagatcagaaaaccaaaaatgttcagttctaacagaaaatcacttaccacaccaagaactgggaagatctcaaactgaatgaaaaagactcaatagatgcctacactaggatgatagaaatatttgaactatttgacaagaattttaaagcatccaccttaaaaatgcttcagacaataattatgaacatgcttgaaataaattaaaatatagaatgtctcagcaaagaaatcaaagatataatggaacaccaaggaattttgactcctgagaaatttagtaaccaattaaaaactcattggatgtactcagcagcagaaaggaaagaacagaggaaagaatcaggaaactggaagacagaacagtagaaatgacccagaatgaacaacagactggataaaagaccaaaaacacaaaaatgtgtaaaactctacagaaattgacataacaattatagttaaacatagtaatactctgctgacaattgatagatgaaaaatcaataaggacagagaaaacttgaacaatattatcaaccaattaaatttaattgacattaacattctgccaaacagcagcaaattgcccaatttttccaagtacatatgtcaagataggccataacctggaccatgcaacaaatctcaaaagctttataaggattcaagttatataaaatacattctctattccacaatggaattaaattaggaatcaataacaaaaagatagcaggaactaaataactttttttttttttttttgagacagtcttgctctgtcacccaggctggagtgtagtggcacagtcttagctcactgcaacctccacctcctgagttcaagcgattttcctgcctcagcttcccaagtagctgggactacaggtgtaagctgtacaccaggctaatttttgtatttttagtagagacagggtttcgccatgttagctaggctagtctccaactccctagtgacctgcccttctgggcctcccagagtgctgggattacaggtgtgagtcaccacacccggccagcatttcagagtctataggtcaaataaaataaaataaaaaataaaaacaacatatcaaaacatataggatgtagataaaataagacttcaaggaaaatttatagcattaaatgcctatattaaaagagaagagtgtctcagtgactgatatggtttgggtttcagatgctcttctttttctcttgtttcttaagataaacactgtattcgtccatcagtgactgatatggtttggatctgtgtccccactaaatctcatgtcaaattgtaatccccagtgttgacggtagggcctggtgggaggtgaatagatcgtgggtgtggagttctcatgaatggtttagcactatccgcctttggtactgtatagtgagtgaattctcaggagatctggttgttcgaaagtacatggcacctcctcccttgctctcttcctcctgctccagccatgtgatttgtgccataagtaaaagctccttgagacctccccagaagcagaagccactgtgtttcctgtacagcctgcagcactgtgagcaactaaacctcttttctttataaattactcagtcttagggatttctttatagcagtgtgagaacagactaatatagtgacctaagcttttaccttaagaaacaagaaaaaaagaacatctgaaacccaaagtaggcagaaggaaacaaaaaaaagagagaaatccatgaaatgtgcacacctgttcatgataaaaaacacattcaacaaattagaaatggaagggaacttcttcaacataccacctataaaacacccacagccaatatcatacttaatggtgaaagacagagtactttctaagatcagggacaagacaaagatgtgcactctcaccactttttttttttttttttttttttgagacaggagtcttgccctgttgcccaggctggagtacagtggcgcgatctcagctcacggcaacctccgccttccgtgttcaagggattcccctgcctcagcctcctagtagctggaattaaaggcacctaccaccacgcccgtctaatttttgtatttttagtagagatggggtttcaccatgttgcccaggctggtcttgaactcctgacctcaagtgatctccctgcctcagtctctcaaagtgctggaattacaggcatgagccaccacgcccagccaactctcaccacttctatttgatacatgctggaggttctagccagggcaactaggcaaataaatgaaataagagacatccatatggaaatgaagaagtacaatgaagaagtaaagctatatttgcagatatgattttatatacataaagtcctaaggaaatcacaaaaaactaataagactagtaaatgagttcagcaaagttacaggaagatcaatatgcaaaaaaattgtgttcttacacactagcaatgaataatcaaaaaatgaaagtaggaaaacaattccatttacaacagaatttgaagaaaatacttaaggaataaagttaacaaatgaagaggaaagtttgtacactgaaaattataaaacatcattgaaagaaattaaagacgacctaaataaaaggaaagacatctgtggttcatggataagaaaagttaatattgttaagatgccaatacctcccaaattgacctatggattcaatgcagtccttaacaatatcctagctggctcccccctcccaaccccactgcctctagaaattgaccagctgatcctaaattcatatggagacacaagggacccaaaataaccaaaacaactttagaaaggaagaacaaagttggaggactcgcatttcccaatttcaaaagttactggaaaactacagtgtggtactggcacaagggtagacatagagatgagtggaatagatttaaaagtccagaagtaagtcttgacactgtcgattcattttcaataagggtgctacggccatttagtaggggaaagaatagtcttctcaacaaattatggtaagacaactggatatctgtctgcaaagaaagaatgaagttggaattctactttataccatacacaaaaattaactcacatcactgacctaaatcctataggagctaacactataaaactcttcaaagacaacacaggggcaaatcttcatgagcttggaataggcaatgatattttggatacaccaaaagcataagcaaaacaataaataggagtatatcaaaattcaaactttttactgcaaatgataccatcaagaaagtgacaagatacccactgaatgggagacaatatttgcccatcatacatatgacaatggacttgtatctagaatacaaaaactcttagaactcaacaataaaaaaaaaatggataatccaatttctggaagtcagtcagatttctgggatgatcactcccatcctcacaacaacaacaacaacaaaaaaaactaaagaaattaattttttctggatctgtcagataatagaggtcacaaggcaaaccaccagccttaaatctggagagacaagcaaacggagatcagcttacttggagcagaaggaccaaggtaagaccatttaggcggggaaagaatattggtaactaagtgttaccaataacactgctaattaagtattaccagctaattggtaatatttactagcagtgtaattaagtattaccagctaattggtaactaagtgttggtaactaagtgttaccaattagttgataacaagtaattagcaatgctattggtaggagcgcttaattggtaatttagagaattcattggaggctagcttcaaaaatcttccagggacgcagtcttagggggagcctcacactttcatggaatttacgtccagtaatgctactaggttctcatggtgaatttacaagaaaaatctcatgttttggaggaggacaaaagtaactattttgaaatacactgagagtgttccacataacaaaggactgctatccaagggaaatgactttatcagatacttatataactggggagaaaggcaatatgtcaactcgccttcctgtcttacctaaggggaaaacagaaagactaagaactgcgtctgaagatcacaggccagggactcaggcccactaaaagacagattaaatcatatgattgtagaacacttcccctctccccacactttaccaccatatcaataggattcttgtataacaacaggataataaaagtgagaaggctgcaagacacagattctatttttaaagttcttagggaaattcaaagacaacagggaaggaaaaagaagggacactacagaaaggtaaaactgaaacctctgacaccttcagctaaatcaaacattaaacacagcccaacacctagccagattaacataaaacctcacacttaactgaagctcccacattgcctgctatatagctgtctacagctgtgtattctcctgtcctgcacaatgtaatcacactctgcaagaagctaaagcttactggcaggcccttacttatctaggtatatccaaactctgatgaatgacggcacacagggacctaccattgccaatgacctactcttctgcatcaaggaactgcagattagatttgtccttgtcccattctattggctcctcatgtgatgcccttttggtgtaagccaatgccctacaaactagccaacttacacccattggtgccacaccacttaatttcatcctttgggtgaaatgacccctacacaaaagcctttaaaactatacttcccttcatgcttaacagttgggacctggacatgataactacccctctgtggtctccacagtgacctccacaaccacatcagcgccagtcccattgtccaacaatccatgcttcactctgcactattccttcatcatgacaccacatcctactttcttcaacttgccagataatacatgtgaaacagtaacagaacatgtcatccaagagataaaactccaacaatgctgggcctgccagcaggcgtcccaacctgggtaaccactcgtacaactgatttccacactcttggaggtatgtgatatccatactactaaccagtcgccatcctctctggtcaccctccagctcctttacttccccaggcaccctcaacctcatcaggttcttcctctgaatttttccttcacagtcccacctttcctgccctctgtcaacgattgatattatataaagccattgaaagtacaagggcctcacacgtatgcactggtgaatgcccttcccataaaaggggataccaggccacctttttgtatattataaattgggcctcatcacaatctttggtataacaggcataagtctagatcttttcagttctgtagcagacttcattcttagagctgccagccaaacaacgtcacaattcctggcagaccatatgtaccaaacagcccaagatttagaagcccttaatgagataaagctctgtagctgtcatggtagttgataaaatactgcattagactaactagtggcatctcaaggtggccctctgaagggaacctctggctgtgtgaaggtcagtaaaaacaggaaagctctccagaatcgttcagtagataacaaaccaaaacagtcaacgaagttactaagttactaaaatgtggcaagagtttctgaatccctatttcttctcctgactgcttccttctgcctggattaacattatctggcaccacattatctttcagggagctattataattgctggcctaattttattgggtcaactttgcatatttggcctctctcaaatgcaagtttatttataggaaacctaggagtttgctgtgctaacccaaacatcaggggtgaattgtgaagactggaggaaacttggtgtttgacttagtgcaagccacctataagcatctcttgcctatgtccagtctccctcacaatcctgatgaggttcacttactgctccacaagtgcatatgccctccaccacctcttttaaactgtgtgctggcaggacatccccttttataaactgcctgaacattgactattctgttttggatcttttcttggacagccctcccaccccgtaatcatctttctttgatcattccaaaggactaccgtcaggagtttgacatacaaacctaaccttggaaggagtttcgacattcaaacctaaccttggaaggagtttccccacatcatagtagaggtgctgtaataggcatatagattgggagggaaaaacatttttttttttttttgcagatgacaagattgtctacacagaaaatcccaagcaatcaatagaacagctacttaaaccaatactaagtttagcaagatcataggacacaaggtcaacataaaacaatcaactatattgaaaaagaacaattggaaattgaaatttgaaaaacagtactaatttagaaccctaaaaaaggaatatgtaggtataaatctaataaagtgtgtgcagaatctatatgttaaaactacaaattactgatgtaataagggagtcctaaataggcagatactgtgtgtatggtttagaacattctcagtattgctaaaatgtcagttgtccccaaactcatctatatattcattgcaatctcaataaaaatcccagcaaattatttttacagatgacaaagctgattctggaaattatggcaagacaaatttgatagccaaaataaaataatgagttggaagactcacagtatctggtttcaagacattatatacagatacaaaagtcaagatgtgcaatatttggcaaaatgatagacacataaatcaatgaaactgcactgaggccagaaaaagacccatacatgtatggttaatggattcacaaaggtgccatggcaatactgaaagaattggattctcatatgcaaatagtggacctcccttatataaagattcacatcttatataaatactaactcaaatatatcatagacctaaatataaagcctgaaaacataaaatttgtgataaaaaagtgggagaaaatctttgtgaccttggattaggcagagttcttatatttgaaaccaaaagcacaatccatcaaagacaaaaaaggaacttcattaaaaaaaatttcttgtgtgaaaaatactgttaatggaataaaaacacaagccacataatggtatacaatatttgcaaaacacataactgacaaagatatctatccagaacatataaagaactctcaaaaatcaataagaaacaatccaggttttaaaaaaatggacaaaagatttgaacatagttcacaaaagaaaataggcaaatggatagcaaacgagcagtggagatgctcaatggccattagggaagtgtaaattaaaaccaaaatgaaatcccgctataaccctttgaaatcctaacaacaaaataaaaatgaaaccaaaccctgacataccaattgtcagtgaagttaaggaactgggactttcatacactggtggtgggaatgtaaaatggtacagttattttagaaaagtctgtcagtttttcatagataagtatactgttaccatacaacccagcaattccactcctaatatttactaagacaatgtggacacacaaaactgtttgcaaatgttgacagcagctttcttcataatcactgaaaactgaaaacccaagtatcccaccagtgataaatggataaacaaactgtggaacatccatatgacagactactactcagcaataaaagaaatgacttctgtactgatatatgcaacaagacagatgagtctcagaagcattaagtgaaaggtgcgactccaaaggaaacatactctagaattccatttatatgacattctggaaatgatataaactatacagacagaaaatgagtcagttgacaagggctggtggtggggagaggagctgactaaacagaacaagcaagtttcagggcagggggtactagaactatagactatcttgattgtgatggtggtgttcacataacagcacttgccaaaatgcatgatagagtcagtttcactgtatataaattattccctaattaaaaaaagaatgttagcttatatgattttcatggatgccttttatctcattgaagaattttttcatcatgagtggatgctaaattttgtcaaatgttttctctgaatctactgagatgatcatacatttgatcataagaatccagatataagagtacatactaaatccataggaagctcaggaacagacctaattaatttatggtatagaaatcataatacttggcactggaggtgggattgactggaaatgggcacaagaaaactttttggtttaatagacatattgtatacattgatcttggtgatgattacatttgtcaaaattcagaaagccatgaacttgagacttgtgcatgttactgcatgcagattacacctcaataaagtactgttaacatacaaaacttctagttgctagccagaaactgatttctgaacccactaacaagctgcaaccttcagtttgataaacacttgtccacgagatctgcaaaaatgggaaaatcaggccatatgactaacttatatatcctccaagccttgcagaattcttctgagtacaattttagagaaacttctagagataaataaaaatgtcaaatattactgaatttcaaatatgacagtaatttcaaatactactgaaaaattacaacgtattaggcactgaaaaggcagagtagatttggcagtcaacaaagtccctgccctcttggatcttatattctagtggaacagaattcagcatttctatcttagtacttctgatttactccagatcagactcatccttcctgatcctcttgtctgcatgtatcagctaatggtcaatgttctgaatgcagtccatatgtctccactcttgtgaggcttctctgctgtgtggtctcccaatcacttggctgaactactgactctataaaacaaatgttttgtctatgatagctctgattattaaaatatttcagcacccatctgagatagtaaaacatattttatcgagttttcctgtgtgaatcctctgatgaaggaaagtccttgtcaccctcatcatcagcatggactcgctgatgaatgataagacttgagctccaactgaagcccttcccacactcctcacatttgtatggtttttctccggtgtgaactctttgatgggcttgaaggtatgagctccagctgaagactttcccacattcctcacatttgtatggtctctctcctgtgtggaccctctggtgggcttgaaggtaggatctctgtctgaagcgcttaccacacacatcacatcggtatggtttttctcctgtgtggactccacgatgtgccagaaaattggaggcccgacagaagcccttcccacactcctcacattgatagggtttctctccagtgtggcacctctgatgggcttgaagctgtgaacctacactgaagcccttcccacactctgcacactgatatggtttctctccagtgtgaactctctgatgcacctgaaggctggagaactgactgaaggccttaccacacctctcgcatttatagggtttctctcctgtgtggattctacagtgtacattaagatctgagctccgactgaagcccttcccacatgtaccacatttgtagggtttctctccagtgtggcctctttgatgggccagaagatttgaggcctggctgaagcccttgccacactcctcacatttatagggtttttcccctgtatggactctaaaatgaatgttaaaatctgagctacgactgaagcccttaccacatgcatcacactgatacggtttctctccagtatggcctctttgatggtccagcagatttgaggcccggcagaagcctttcccacactcctcacatttgtatggcttctctccagtgtggcttatctgatgggcctgaaggtgtgaacccacactgaaacctttcccacactcctcacacttatagggtttctctcctgtgtggattctacaatgaatattaaggtgtgagctgtaactaaagctcttgccacatgcattgcatttgtatggtttctcgccagtgtggattcgctcatgagcctgcagtcgtgaacgccaactgaagctcttcccacactcttcacacttatatggtttctttccagtgtgaactttcagatgaacttgaagatatgatctctgactgaagcccaccccacactcctcacatttatagggtttctctcccgtatgaactatcagaggagcttgacaatgtgagcttttcccaacattcctcccacactcttcatatttgtatggattctctccagtgggaactctctgatgatggggaagatgtgacctctgactaaaactcctgtaacttgcatcatttgtgtatgattttgctctactgtggactctctgatgggcttgaagacttgaaaaccgacggaaggcattatcacatttttcacatttgtagggcttctctcctgcatgagccctttggttaatttgaagatgagagctccagctgaaacttttcacacaatgttctcctttgtagggtttttcaccagtgtggactctgtgaacttgaagatgggaactctgattactgaatccctcatctttatagtgcaaatcatctcgtttttccaactggcagcctgttctttgaatatttaccacagaatcttgatacttgattaactctcttgtaatctgttgccagatctgggagcagaaaagctcttcatgaggcaggtaccttaatcctacttcttgaagagtctccatctcttttagattcttggctcctaaaaggataaagaaaatgtggagatggggcatgtgaataatgttttgttccaagatgtcaagtttataaactcgggcccatagcctaaggcttcattgaaccaggagaaggttccattgcctactgcatagacatctgaacaaagtggccctgttcaaaatgtctagtaaaactcctacacataaattttcaaaaacctttgcctgggattatttcattggaagtttattccaaggttgggagatgttgaggcactgtgctagttagaaagacacatttttcagaaaataccttatcacctaagtcagggcccccaacccctgggccgtggatcagtaccagtccgtggcctgttaggatctgggccacacagcaggaggtgagcgggaggccagtgggcattactgcctgagctctgcctcctgtcacatcaatggtgacattagattcttataggagtgcgaatcctatcgtgaactgcgcgtgcgagggatctaggttgcgtgagaatctaatcttatgagaatctaactgaggtctgatgatctgaggtagaacagtttcatttcaaaaccatccccccgaccccagtctgtggaaaaaccatcttccaacaaaccagtccctggtgccaagattggggatcactgacctacatacctaaagttcgagtgtaaacagatagtggtcctttacctcttgctaggaaatagcctccatgagaacacctgggagaagaggtttatggtaataacacacattattctaaaacctgatagcaattaaagtttccataaccaccaggggggtt[132 bp omitted]cactctgtcacccaggctggaatgcagtggcacaaacatggcttgctgcagcctcaacctcctgactcaagtgattctcctgccttatccccccaagctgctgggactacagaagcacaccatcacacctggctaatttttgtacttttttgtagagatggggtttcaccatcttgcctaggctggtctcaagctcctgagctcaagctatccacctgcctcagtctctcaaagtgttaggattatagctgtgagcccccacgcctggcccagtgatgcctctttatcactcaatatcagatagtaaattctccccatctacattacacccctggcaatttccattcacctgttttgttttgacaaagcacatattaccctctgacaaactatatatgtcccttattattttttatgtctctgttgaatggatgttgccatccatgagaacgagcattttatatcattcaccactttatcatcacccaagagctctgcctgactcaacacagtgttcaatagatgtgttgaataaaagaattcccacttgtcttctctgggagactttgagccaaattacaaaagtgaaagaactttttcaagtaaacgatgcataatgggaaagggactggaaagagcgattcttctgggaagtttaaaggtttcaccagattcagggctaagtggatggtgctgataagaaaatcatgctgatcacaaaatcatggtaagaattacttaggaaaaaaaaaaatcataaggcagaaaagtggccaggggatctagggactgattgcttctaaaatttttgttctctgatttttcctttttcaagtaggagtcaatatttagagcctcgggaataatgttttctctgaaagcagactataaaaatggatggatgtaaatatatttttctatatagatcacaccattgtttttcaaactgaaggctaggactattagtgagttggaaataaattcagttgcttgtgacaagcattaacagaaaagaaaaatattagacgtgttttgtaagcaagaaatgtatttctccgcataaattcttgtttaaggccacacacacacacctacccatatgtgaatgtttgtatttatgatataaaatgtatttcttattgtaactcatactcaaaagtttgaaacctcccagtctaaatgattaagaaaggtattaatttcttaatcaaacaaattgttcaaatagaaagttacattgtaataatggaaacttgggaaacagataaatgtgtttcctttaagttgaagcctacatagtttgtcatgtctgtatatactttgcaagttttcacttttatttttatttattttttttgagatggagtttcactcttgttgcccaggctggagtgcaatggcgcgctgtaggctcactgcaacctccacctcccaggttcaagtgattctcctacctc[223 bp omitted]tgagaatgtgtcaatttgaggagggcaatttccctattttgcccaggttataatgtttctaattgaaaatgatatgttaggcccttattacaatgcagagaaaactaaaatctaccttctttagtatatgtttatttaatggctatcttctataacatttatttgcttagtggctaattttgtagaaaataaaggcattgccatacataccatatttgaatagggactactaaaatgataagtaatattcttttctgtaactctctttggaagaggtggatggttgccacaaagaaaatttttaaagggaaagacttaaaagctattctctaaacattgttttttccttgtgtaaagtgtttttggggacctgcctaaaacgtggctatgagaacctttattctaaaaagtagttcttcaccaagtgagcaagattcactattaacagctacaggaaagccacaagggggaaatgatactcaatttgattacaactaaagctaagctttcattagatgtgagtgttatggtctcaatgtgtgtgcccttgccatttgtatgctgaaatcctaactcctaaggcattaggaaggtgattatgtcatgagggcagatctttcatgaataggattagtgcccttataaaagaggcctgagagagatttcttgccccttccctgtaaggacgcagcaaagaaggtgctgtcattggatcaggaagtgggccctcagcagacactgaatctgctggtgctttgaacatggacttcccagcccccagaaatgtcagaaataaaattccgttgtttataattcccccagtcggtagtattttgttttagcatcctgagcaaactaagtgggttaatgaatacagatcttcatatatccaaaagcacccaataaattagaattagattagatattcatcagggggaaaaaaactgttctagactatgccttcgtcacacatttttgtttgccaaccttggaatatctccaaggctaacagaaaaatgtccagcagccccagcccctcctcacctgaggagttatctctctgggttgccatcttcatcatccacagcttttcttctctctctaactgtggtaggccatctggtgtggactgatgccctgtgaaaaggcaaggacataggtttataattaatacatcagaagccaaaattactcaaaattattgtcctcatttcatcgtcttcaggacatcaaacttagtgttttccacacttctaatcatgacccattggaggaagtatatttcatgcaaagacccaagatatgcagatataagtataaattactgggaaaaaaaatgttttcatcataccccctccattgtctctcacattcttcttggcaacaggacatagtttttgctgcaatgtgcagttattgccaagtgctctgacattttctaccccattttatttcattaaaaaaaccaatggtacaattcatcaaatgtatatcaggacccactaactggagatgaccacaatttgagaaaggataaaagtgtatagttgtcatgctgtcaatttatggttcattaacaaaatacacacttttgccaggggagaaagactttaaaaattccatatctgtcttatgatggatgattagaaaactgaaaaccagttcaagagctccaaagccctgtatacccaaggacagagagacaacagagggagccaatgttcagtcagagaatgcctgtcctcacccactgagaccacattcctgaagttctccagcatcacatctcggtacagcttcctctgggcaaggtccagcagttgcagctcctcctcagagaagaccacagccacgtccttgaatgtcactgcctcctacaacatcaaacacactccacctaaatcttgcaataaaggtccactggaaaagggatagcactgagaaatgtgaaaaagatgtgtagggaaaggtgtcagattcttaagagaccatattcaactttattacagttaaacacatataaagtgtattatattttaggtttttccttttcataataaatgctgtaaagaacaactttttgcatagatattacccacctattttcttaggtaagttccaagaagtgaaaaatcacaatgtcaaagaatatgcaacttccaaattatgatgtacgacagattttcttttcaatttttccctgtcttatccttcccccaagataaagtatcattgattttccataccatagataacactgaatataaccaatttttaaaaaatcctaggcaatctgttcattaagaaacaactgggttttttggtctgtaattaactagtaagatcatattttcgtatatttactggacatctttatttttctttggtatctcacctgttactgtccttttattgatattccatttagaattttatcttataactctgtaaaatttctagtgatgattttaagtcgttttttagcatatacgttgttgttcacctacattttgctggtgttttatagctttgtgttcaggagtgtttcttaaactcaacactattgctgtcttgggcgggatagttgtctgctgtgtgggggtgtctagggcactgtagggcattttgcagcacccttagcttctacctactagatgctggtagcacccccgacctgtggtaccaggaatgtttccagatgttgccgggtggggggggggggcagtgggcggtaaagtcacccatgataaagaagcactagcatatcgtattggtttttttttttttttttttgagacagagccttgctctgttccccaggctggagtgcagtggtacgatcttagctcactgcaatctccgcctcctgggttcaagtgattcttgtgcctcagcctcccgagaagctgggaatacaggcgtgcgccactatgccaggctaatttttgtatttttagtacagatggggtttagccatgtttgtccaggctggtctcgaactcctgacctcaagttatccacctgtctcggcctcagaaactgctgggattacaggtgtgagccactgtgctcggccagcattatcatactgttttaacttttcatatgaagactgttcatccctggagccctgcacattcaggtaccctaaatgaatgacagtggtcatagagaagaagaggccactggagagtgaatcgagtaggggcagtattagctgaggcatcttccactaaccaggacaagctaggcacccacacaaaaagggccaggtccactaagtggagaattctttttctttgcctctctctcttcagtcaagtaaaaatcctggagtcttttgaaatcagttggatctttggtatcctatgtgaaactaagcaactttccacaattctacagtcttgtttctttgtaattaaaatgcacatgagaccaaggactgcctcataaagttggtttgaggaataaatacagtaagagaagtatctggtaagtcctcttgtactgctagacttttaaaattaagtacattattacttcaataaaataagttaacataagagtaaaagaatacggatcagtaagtaaacatacatagggtataactcaggcctgggtaagaaaaatctagctttcttttgtggaaatatctaataatattttctctaaaatcagtggcatcatgtcacacgatgtcatatctgaatcattgacataggaactacccaaagtaccacatatcaaaagtactttttcaatatagtgtttctataacattaaaagtaaataatagcaaaactccttcaaattgctttttggaaaaaatggttatttgtgggaaaactgtagtaacaattttcagtaaaaattctaaactacctaaacattgatgaatgaggagaaaagttatctcacatacacaccacagagtaacatcaattcaagggactataaaaatatggagcaagtaatattaattagaaaagatgtaacttgaacattttgtctatacaatgcttataaatacgcagttatgaatacatctgaggaaaagaacatggaaaatcaaaacagttgttttgtaagggaaacagtaggaaaatgagagatttttattgttactgacttttctattctatgcttatttatcaaattataaagtcataaaataaagcaacaaaaattaaacaacacaaaagtaaaaagcagcaagcatttggcacacaagaggttctcaaatgtctaccgttctccttcatcttcctaacaaagagaataaggtgtatgtaatctttccgaaatgagatgacaattattacggagaaagggaggtccaactcaccttagacttcgtcattttgtcctcctccttctggagaagtgccaagtcttaagagggaaggagaaaacatgagggaaggagaaaaaagccatgagagtttggccaaaaaaaaaaccatagctgtttttttgttttgttttgttttttttaacgtgaaatagcaacagtgttccttcctcgggctggcttgatgaacagaaactaggctggattccagatactacttgtccctttggctgtaagaccctggcagcaagtgacctgcccgaccacacagagtatgcccccaacataatttctccttgtggctctcagggtatgactgattctagggagagtagaaattgagagtaaaatacccagattaagagtatttggcccctctggagccaaatgcctagatttatggcattgctatttattcgctatgaaatccaggacaaattattaatatctctgtgcctcagttctttcatccataaaatgaagagattaacaatgagagaattaacaatctcataggattgtttacaaattaaatgagggaaaaagctcaaagaatattttcagagtaccttatttcttagctgcagaaaagcacataacataaaacctgtgctcattaatggtttctaccaataaattctttgtttttttttttttttttttttttgagagagggtcttgctctgctgcccaggctggagtgcagtggcacaatcatgactcactaaagccttgacctcctgggctcaagcgatcctcccacctcagcctcccaagtagctgggaccacaggtgtgcaccacaatgtccagctaatttttttactttttgtagagacgaggtcatgctatgttgcccgagccagtctcaaactcctgagctcaagtgatcctcctgcctcagcctcccaaagtgctgggattacaggtgtgagccaccacactcagctgatgaattctttagtagaggttttttaacctctactttaacctcgcctttaacctctgaaatacctgttattctctcttggtttcccatacttaatttgaggcttttgcaatagtatttaagattacagtggtccttcctatccatagttttgctttctgtggtttcagttacctgaagtcaactatggcccaaaaataggtgagtacagtgcagtaagatattctgagagagagagagagaccatgtttatagaacttttgttacagtattttatcattattctattttattataagttattgttgttagtctcttactgtgcctaatttataaattaagctttatcataagtatgtaggtaaaggaaaaacatagtatatttagggttcagtaatatctgaggtttaagtcattcactgggggacttggaaggtatctgctgtggataaggggggactactgtacatagatgactgctttttttgatagtaaaatatgtaacataaaatttaccattttaaccattttttaagtggttacattcagtaagtacatttacattgttgtgcagccatcaccactatccatcatcagaattttttatgtacccattaagtaataattccccattccccctcccagcccctgataaccacgttatctctatgaatttgactatatggactggtttctaaaaggtataagaccttgcaaaatttggctgtgtagagtggctcatgcctgtaatcctagcactctgggaggccaaagtgggaggactgcttgaggccaagagttcaagaccaacctggccaacagagtgatctctaaagagaaaaaaaaaaaatctaaaaaaaaaaaaaaagaccttgcaaaatttactttaacagtagggccttaaaaagactatcatagagacagagaaaatttaataaaaaatcatgactctgcaagatttatgcaactataaattagataatgtcactgaaattaacaagctataggaagcacaataataacaacaaaaatggtgatatttaactaaatacatattagggaccttatgaagaacttggcacatgatgtttcattaaggtacttcacacatacctgtgaagaagctactgttgtatcagttgtgtgaccttggtccaaacacctaaacttctgtgcctatgctcagctataagaagggaaatgaaaacaggatgttaatcataggattactgtgaggaatcaatgagtgaatttatgcaatgcccttggcatagtacctggcattttagggagttctcaacagatgataatgacgacaattgtatccatttaacaggcgaggaagctgaggcttggtgaggtcaagaggcaggaacagtacctgaatccagctttcataccagagccagtattctaaatcttgtctctctgttgcttctaaagacaaaaataagcagatgggagtctaagatctcatggaaggagaaatgagggctccagagttaggggtaaaagacagacacagaaatggagattggactctgaagccaagggagctgcttgagggagtagagaacagagttgtgaacagtctagactccagaaccagcccaccagtactggaatacaggcatgtccaacttgctagtactttgtgctctaatgtctaatctataaactggatgtaataataatacctacttcataggaaggtcagtgaaagtgactaagtatacacaaaacatgtggaacagtttctggcagcttaaacaatcaatagaagttacacataaacccatgcagatgctttacatgaaacagtcagggagcccctcccttgctgctgtggaccaatgtctgtgtcccctcaaaattcttatgttgaagccctaatgtgatgttattgggaggtggggcctttaggaggtaattaggtcatgagggtgaagcctccataatgggattgctttccttgtaagaaaagcaagtaacctagctctttctctcttcctcccaggaagatacaagacaacagcttctgcgaaccagtaagagtggcctcattagacattggatttgccagtgacttgatcatggacttcccagtctccaggactgtgagttataaaggtttgttgtttaagccacccagcctatggtattgtttgttatagcagcacaaatggactaaggcactcacggagtctgcagcttcacatggcttgatgatggggaaacatgggctggattccagattccacttgacccttcagcagagagcctctgcacagtgaaaaatggagttcttgtagctctcagggtatgattctgattctatggagggtggaaacgagtaaaatacccagattaaaagcttagtattagttaattactgcttgatttattagtaaattattcttagttctcttacttcagatagaagaacccttactattgaaaagggaaacataaaaccttccaatcttagaagaaatacttatttatttatttttctgaaatggagtcttgcgctgtggcccaggctggagtgcagtggaatgatctcagcttactgcaacctcagccttccgggttcaaaagattatcctgcctcagcctccccagtagctggattatgggcacccgccaccattcctggctaattttttttgtttcttttgtttttttagtacagatgaggtttcactattttggccaggctggtctcgacctcctgacctcaagtgatccacccgccttggcctcccaaagtgctgggattataggcgtaagccaccacacccagcctgaaatactcttttagaatttgtaattcactttgttctaactctatatttgcccagcaacctctgctcagtaagaatgttttgcaggggatatatttccatcgcctcgggaaaaaaaagagataatagcaaatcaaccatctgtcttgtgatgaatgtttattcagctttatatcccaagtacctaaaacagttcctgtacaaagtaattgcccagcagaaatgactgaacccaccatcagacatggagaggcatataggaagactagactagttggtctaagtctccctgagactgactccagttgggaagatttggagagcaagggttttatttccaaatttttcctctaggtctttcaccatatttgctgtccttgggcaagatcagagtcatctttggaaggaaaagcatctctggattttgttaaataccatcttaggaaagtactctctgctcttcaaagtcagcgacgacatgagtcactgttacagaacccacagaatgtgtcccttaaaatactgagaatgaacactattttactgcctgcataattagcactagacaggtgaatttattactacttcattaaatagatgagtttattaactcagtgaagacttgtgggaaccttactaaaagagatgcaattccccagcctcaagatgctcacagtctagtgatgaggaagctggcaattccactatacatggctaaatgccagagtagtgcacagcatcctttagcggcatgaggaatgggctcataagcccacagtggaatgcaggggttctacacaaacgtagcttaatctgagccctggagggtgactgagctctattagccagagaatccaaatcactataaaactcccagagaacaaatgtcatgatgtgaagacaaataacaggcagaaagagatgggcaggaaggcagaattcaaaccatgatgacgttcaagtcacaaaattatctgcaagtcagcaggagaacactgaaggacttctggaaaggagagtaaaaagattcctttcatgttagaaacagattaccctctcaaacgggaggaggcttgagggggaggaggctagggccagagagactattaggagagccacactaagaaactctttcttctttattcaaatgtcaccacctcagagtctctctctagccatcctgtagataatttcggtctcctaactgcaccccaacacttcctatccctcatctctgcttacttcttttctctaagcccttattcctctctaacatccttctaggtatttacttacttatattcattacacttgtctaatgtggagtttcgttacctgctccatccccaacacctactaagttgctacaagcatttggaaggaacccaaagatttgcagaatgactactttaatgactcagtgaatagttgatagatacaccatgtggatcagggcctcattatttatcacctgaaccattcattcaacatatgattgttgaagggtctactctgtgccagccaagggtcctagatgtgaaatatacagcagtgaacaaagaccttgatctcacaaagatgatattataatgggctacgagggcatagcaaacccccaatatatagcgagagacacttttaagaacaatagggcagggtaaagaaataaagagatgaaaggaggggctgtcacagaataagtttttgtcatgaaagatttctcttatatttgaacagagacctcaaatataggaagagaaagccatgtagagatctgatatctgaaggcatgtaattcagccctgaagaacatagaaaatttttttttgttaaaaagccataggtctggtatttagcaaagacatggaatcaacctaaatgcccgtcgatagcagtctggataaagaaaatgtggtgcatatacaccatggaatactaggcggccataaaaaagatgtcctggctgggcgcggtggctcatgcctgtaatcccagcactttgggagagtgaggcaggcggatcacctgaggttaggagttcgagaacagcctaaccaacatggagaaaccctgtctctacttaaaaaaaaaaatacaaaattagccaggcatgatggcgaatgcctgtaatcccagctactcaggaggatgaggcaggagaattgcttgaacctgggaggtcaagcttgtggtgagccaagatcgcaccattgcactccagtctgggcaacaagagcgaaactctgtctcaaaaaaaaaaaaaaaaaaaagatgtcctttgcaggaagatggatggagctggaggacattattcttagtaaactaatacaggaacagaaaaccaaataccgcatgttctaactcatcagtgggagctaaatgatgagaatacatggacacacagaggggaacaacagacactggggtctccatcagagggtggagggtgggaggagggagaggaccagaaaaaataactcatgggtactaggcttaatacctgggtgacaaaataatctgtacaacaaacccccatgacacaagtttacctgtataacaaacctgcacgtgtacttctgcagttacagaagatcaaggatgggactaagaacctatttctaccaatatcccaggtgatgctaatgctgctggtccctaaattacaatttgatagcatcagttaaaacagctctctagatattttcagacagactaacacttgaggttttcacctccaatttttctactaaccccaatatactatcctattgcctaagggcaaaaagaactaaagaaggtaaaaacaaactgcaagcttctctttctctctgatactaacaaacaggaatgaaggtttgttaggatcaggagtgccaagatcaactctatgctcctaacattaaccacgaaaaaacccaggccactcataaaatactccctataatgacagcaactgacatttagagcaactgactggctgcctaccaaggcactgtttacataaattcttcacatgtagtatctcatttgattttcataacgatgatagagattgagaaaataattatgcccattttacagacaaggaaatagaggcacacagaagtaacttgttcatgtttaacaagtggtcaacagaaaagtcaggattttcacccagtgccttatctactagaacactggctgcgccaggcaatgaacccaggcaatctgacacctgtgcccatgttcttaaccgctcgacagtggttctcaaaccctggtatgcatccatatcaaaaggcctgaggttccatgtgctgccttgatacctttgagactcacagggccctgaaggcctagccatgagctcccggctctctccagatatgccctctcagtgggaaaggatccctgcccgcctagttcctcgtgtgttaaccatgttttatgtactggctatttgatatctgctattcctaatctctccctaagtctgctgaatcacagggccagactaacaaccaaaattatgtgcatcttccctgcaagcagctttcaccggtgggagaaagacatattacaaaagcataggccccagttcctttctctgtctgcttcctgacccttgcctgtagtgggcttcatgtggtctggtgtggtgtgatgtaccagtggaactctaagtattaaaatactattcattggcattaatctctccatgttgtcactcagccgcttttataaaattaagacttaggcacaattcatcctatttagccagaccacctgtaccccaccaggtcctccacataacaggttttgcctccctgccagcctgtagaattatccaaatggtcaattaaatcttcttgcaggaaccaagggtcaccctgctaccctcctgtcactacaaaatcaacctaccatggcccctgttggttcaatctattctcaagtgcaagtcccctgggctgtgaatatgtgactaataaactgctaccaacctcttctgcataggctgactgtagggtttgtgtgttcagccacctcctgccagttcaagtgatgtcttagtccatttttgctgctataacaaaataccacagttataaagaacagaaatttctcacagttctgaaggatgggaagtctaagatcaaggctccagcaggttgtgggtctggtaagggcctttttgctgtgttctcacgtggcagaagggtaggggaaaagggggatggaggaatgctgtgtcttcatagtcttcatatggcagaagaacaagggaggtgaactctctctctgaagcctcttttataagagcattaactccttcatgccctcatgacttaatcacttcccaaaggcctcacctcttaataacaccacaatggggattaagtttcaatgtttgggggacactcagacagcagcaggtgggggaatccctccttcaccaatggggtgaataggtgaccagaacccccgaattactaataaagaacacagaagttcaagctcatagaagtagtgtagggcctgggtcttatgattctgatgtgaccacagttcaagaaccactgcattattctacactgcctcttaaagagttgacggaactgtccaagggcacccaggaaaccaggggcatggctctgcctggcactcaggcctactgattatcagctccctgctcctctccagtataagatgcccctagagctctctataagaggaaagggctgcagaatgactggtaatgcctctggaggcaaattctcagaatgaaaggggaggcttcccttagatcagtgctgtccaacagaaatataatgcaggcaagctattcgtgtaatttaaatttttctcatagctacactgaaaaaggtaagatgaagcaagtgaacttaatttcaacaatatattttctttaacccaacatatccaaagtattatcccctcaacttgtaatcagtataagaattattgagggattttactttctttttttcatactagatctttgaaatctgttgtgccttaccattataacatatctcaattcagactagttacgtttcaggtgctcaataatcacatgcggctaatggctacactattggatagtgcaggtttagacctttttattaaggcaatatagactatataatcatctcacagggacttgctaagttcaaaagacagcaaattagttgtaggtttcaacaatcactatcatagaaactatgcacatttgtttaaatatgtaacagaattaaagtatccatagaaaaagtggaaagtggggaagaaaagaatacttaaaaatatacctttgaggctgggcacggtggctcacgcatgtaatcccagcactttgggaggcccaggcgggtggatcacgaggtcaggaattcaagaccagcctagccaagatggtgaaaccccgtctctattaaaaatacaaaaaaattagctgggtgtggtggcgggtgcctgtaatcccagctactcgggaggctgaggcagagaattgcttgaccctgggaggcagaggttgcagtgagctgagatcgtaccattgcattccagcctgggcaacagagtaagactctgtctcaaaaaaaaaaaatgtatacatatatatatatacctttgctccttcaataacttgttgcatttttcaacttatctgtagaagatgaaggccagctttagtctataatacacagaggacttactacatgcgaggcactatttcaaacatgttacctatctcttttagtcttcacagaaactttacgaggtagttattaatatcatccctacttaacgggtaagaaaactgaggcacagaaaggtcaagtaacttgcccaaggttattcagtcactgagtgttccaacctagctgctgaggtttgattctggctctgccccgctgattgtgccaccagttcatctgtacagttaacttgtgtgtgtttgttttttcatctttaaaatcagaataaaatagaactgtcataaagaacaaataagctagtgcatggaaagcactagaaattctccaagtcataagaaacacccaacaaatgtcagcagtcctcatcagaatctccatgtgataaatattaaacctggccaggcatggtggctcatgcctataatcccagcactttgagaggcggaggcgggcagatcacttgaggtcaggagttcaagactaacctgaccaacatgccaaaaccccgtctctactaaaaatacaaaaattagctgggcatggtggtgcacgcctgtaatcccagctactggggaggctgaggcaggagaattgctgaaacccaggaggcggaggttgcagtgagccaagatcgcgccactgcactccagcctgggtgacagagcaagactttgtctcaaaaaacaaacaaaccaaaaaacccaaaaaactgaaccttaatagtggtctgatttgtctttaagggagtttgttttagatcttgacaatattatccacaattgttcatcaacttttgaataccctgaaaaagttgatggattctacagcccaccaaacgtgagataacagacaaggactgtggataatccttctattttgttctctaattgcaagctgtagcacccaaaatccagatgcctgttggagagctacatgaatcacttactcactgaataactcctctttgcaaacctcttgctgggtactcttgagaagaatatgataatgtccatgaaacagaggtccctgaagtctaatgggagagagataggaaaccaagagttatatgccagtggcaagtgcaactccaaaaaagcaaagaaaatcaatcatctttcttttcctaattgcaactctttctagctttctcacataagtagcattctcctagctgccaggagtgaaaaacctcagagttactgttaatatctattatgggctgaattgtgtgtgcctctctcaaaacgttaaagtcctaacgctcggtatctcagaaataactgtctttggaaatagggcctttaaagaggtgatgaagttgacttacagcaagggagctcacgcacacagaggggagaggccttacaagccaccaaaactggtgacaccttgattttggacttttagcctccagaactgtaacaaatacatttctgtataatccagccaatttgtagtattttcttatggcagccctggcaaatgaatataattgcccctcccttggccttcatatataaacgattagtgaggcctagcatggtggctcacacctggaatcccaatactttgggaggctgaggtgggcggatcacttgaggtcgagtttgagaccagcctggccaacatggagaaacccagtctttactataaacacaaaaattagcagggcgtggtgacgggcacctgtaaagccagaggcaggagaattgcttgaacccaggaggcagaggttgcagtgagctgagatcgtaccactgcactccagcctgggcaacagagcaagattccatctcaaaaaaaacaaaaaacaaaaaacacaattaatgataattattagtttttaagccttactgactcatcatctgggtttgttttaaaatactcaagggaaaaaaagttggtgggagaggcaataagattagcaagaatggaagcagggtgactgtacataagagttcattatatttgggtatgtttggatatttccatagtaaaaaataagggaataacaacccactatgaatagtgtgataacaatttcataaaacacagacaaaaacacattaaaaactgctaaacagaaatgcattaaaatgttaataattatctatatcctagtattaaggaaatttgtaatattttatatttctgtattttctacatcctgtacagagaacgtgcatctctatgatcaaaatatgaactactaatattgcttaaaattaaatgagaattctttcaaaattttctaaagtctaaactcaaccttgctttcaaaatcttctacagtaaaattccaacctccctccccaacttgatctcaaatggctcctctgcagccagtttcctatgattatttatatggatcatttatctattttatttcctaattctaaattgggatttcaaactgtgagaccaagggtattcagatgtaaggaacccaagtctaggacacaaatcccactgttcttactagcactgtgatataggaaagtaaattaggctctctccatttcctcatctgtataattggtgtaataacagtacccatatcacaatacccacatcacctttgtaaggtgaacagaacccacaacacaaggcctttgtgaaggttcagtgtgttagtttttataaagccctcagagtgatactcagcacccaatgtttaactagtgtgactaatattcatgtcacattttctccaattatacaataacggaacacttctgtagcagaaacatttgcaaggaatgaaataccttctcgcactcggaacagaagaggaaggtgaatgctaggtcctgtcacagtggggctctgctgccagaagccaggatgctctccttcctcctctcccgcagcattctttcagaagtcagggcaggggaaggaaaggaggctgggagattgcacgatcttgtctgagatcctggaaaatccacagaggataactccagacgccacctgttgagtgatgcactctttcttaaaaaacgggtcaggcatagtccaagaacagcctcctttcctgcaggaatcagaaagaagagccaggcgcttgctgaaaaatgaatattttttattatgatagttttaatattaacggccgacatgttgccacattcctgtactattccatacacattttacttgtactatattactaattgtcaaaacaaatatataaggttaatatttccttttgcagaagaggaaactaagaccagaaactaagcaccgaaagattaagttctcacccaacgttacaccgctaggaagctacagagctgtgggaggtgggggaaggcgggtcgggccgctgagagcccaggagatcctcagacgcctccccattcaggtccacttccaaccaggggactcccgaaccgccccgaacgcagcagctccggatacagtaaggcaatcagctgcccagccattcaactccgccctccgctgctcgccgcagcgtcttttcctgctgaccgaagtgcgagccctgctgatcctacgaccaaaccataaaagttaaaacaggtcgcggggtcccaggactcactcacttccacgagaggaatgaaggccgcgctctcaacctcttgccgcggaagtgcccgggagagcagggagctctggaactacatttcccagcatccccgggaggaacggaagccgctgccccgccccctgggcggaagtgcgggcttcgactcccacggccgaatcttatttctcagaatccccaaggggagcgggcttcgtgttctcgtcctcaaatagtcgaagtaccaccgaacccactgagcactggggtataggttcctatttccccaggggagcaaataacaaagccgcgctttcccagagctgaagtgcccccaaaagtctggaccacacgtcccagaatcctctgtagggctgagcttcccgccagcctgcaattttccttttgaattagcggggggagtctaagtcattgcttgtagagctcagcctgctttttccttttgccattgttcccttttatacgtgacagaagttgcgaatatgaaaaaaaaaaaggaaaatacaaaggaatgctatgtgtgagctaaaaacagaggtaataaaagaggtggccagagccgcccagagcaacaagccttttataatatgggtatggattcatctgtgattaaaaatgctcaaaaaaggagatgcaatcatccagcaggacatgaaacaaaagcagcaaaattctccacttttcttgcgcttagttttctttcattcgcaggatactgaagaaagtattatagtattgaataggctctatcctatataaaatcttgaaaacattcagttcagattaaggaatcacatcacttcttgctctcagaatcaggaatctgtaaaggtgtcttatgatttgccaaagtgtctatgaatattcagtaaggagagggaggtgaagtgagggattaagacatgaagtgcaaaaaatacagaaagctatactattcacttttctcctaggtagaaactaaatatttttccaagtttattatgaaagggtaaagaagaaaaaatggaagttgactacataggagtagctgtaaacatctgaacaatgttcaatttaggctgaggcaggagaccagcagggcgtgattccaagatcagataagaaacctgctgaaaccagcaagtgatggaaagcaacctgtaagttccctttgctacctatcagtataagacactcccaccagcgccgtgacggtttataaatgccatggcaacacctggaagttaccaaccccttttctagagatttccgagtaactcaccccttaatttgcatgtaatgaaaagttggtataaatatacccagccaacagcccatatgctgctactctgggcacactgcctgtgggctagtcttggtctgcaaggaacagtcactgagcttttaacactgttgattcgataaacctgctttcttccgctgctggcttgctgttgaattctttcctgagcaaagccaagaaactgccctgcatcaatgccatttcaaaatctggataagtactctctctactttagtaagaggaagagagaaatgtaatcacccaatggactcatcttgcccactgcccagagagagccaatttatcaagacaggaattgcaatagagaaagagtttaatacacgtagagctggctaaatgggagaccagggtgaagactgaactctgccgttttttcttttcttactcaaattcctatctaagggtctggggagtcaagccctccaaaccataaagtctcatgagaggggttttaatttaaccctatataatgtgacttactttccaacctgtcataacacctcatgacggataagaaaggaaatcaaaatacttcaaccccaaatatgtttcattgccctatcatgaaatagccctgcaaagttgtcctttgtggagaaaaatctacattctgtagagaatctcctttcctttttccaggccattttttctgatccaggagagaatcaactaagagtctgacacttttttttttttttaagagttttgctcttgtcatccaggctggagtgcaattgtgcaatcttagctcaccacaacccccgcgtcctgggttcaagcgattctcctgcttcagcctcccaagtagctgggattacaggcatgcaccacaatgcccggctaattttgtatttttaacagagccagggtttctccatgttggtcaggctggtctcgaactcccaacctcaggtgacctgcctgcctcggcctcccaaaatactgggattacagccgtgagccaccgtgcctgggctacctttttaagtctgatgagaaaaatctacgatctcttatttctgaagactgatacctggaagcttcatctgcgtaataagaaccttggtctccacaatctcttatcctaacccagacatttcctttctattgattccaggactttagataaactctttcaaccaattgccaatcagaaaatctttgaatctgcctataacctggaagccccacacacttcacatacccctaccccccaccctgccctccactcccaaccccctctgcttccagttgtcacacctttctggactaaaccaacgtatgtcttgcatatattgcttgatgtcttatgtcccactgaaatgtctaaagcctagctgtggcctgaccaccttgggcatatgttctcagggtcttctgagggctgtgtcctgggccatggacgcttgcatttggctcagaataatctcttcaaatattttacagagtttgagtcttttcattgacagaagttttactgttactgaaatcagcctccctgaaaatttggaggctggggtttttaaaagataagtttggtgggcagggggctagggaatgggtgtgtttattggttggggatgcaattggttggggatgcaatcatggggtgtggacctcttctgggtggatgtcacatgactggtagagtcaagagttgtgggtctgggtggggtcgtctggtcatcaaaaatgcaaaagcctgaaaagacatagcaaaaggccaatcttaggttctgcaatagcgatgttatttatagggataattggggaagttgcaaatttgtgacctccagaataatgattggtaattatttatccctacatcttagcagaattcgggtctctctcataatcctaaacttgtggccttttattagtgctcttgtgagcaaaggctgctcctttcccaaacaatgcaaatctaaagacgactaccctgaacatgtttctcctataagtgtgtctatatgagatttaaatatgttactcaaattcagatttgagaaaatagccttacttaatccttggatgtcattggacattttacaaactcaatttcttttaacattattactactagaggtagtggtactgctaatgttttaaaatcaactttattaagtataatttctattaaaacataccccttttaaagtataaagttcagtacattcgatgaacgtgtacacttgtgtaaagccaccacactcaagatgcatatatttacctcacaccccaaaaagctctcgttagccctgctatgattgttctatcatgtccccagccccaagcactaatctgctttctgttatgaaaaattagttgttttcctgccgaagaatctcatacaaatgaaatcatataacatgtactctgatgtgtgaagcttttttgacacagcatttttttttttttagttggagtctcgctctgtcacccaggctggagtgcagtggcgccatctcggctcactgcaagctccgcctcccgggttcacgcaattctcctgcctcagctgcctgagtagctgggactacaggcgcccactaccacgtccggctaattttttgtatttttaatagcgacggggtttcaccgtgttaggtaggatggtctcagtctcctgacctcgtgatctgcctgcctcagcctcccaaagtgctgggattacaggcatgagccactgcacccagccgacacagcatgtttttaaaattcattcgggttgtactatttgttcttactgttgagtactcttcaatgatacggatatatcacaacttattaatccatttatttcttgataaacatttggaatgctttcaattttttgctactatgagcaaagctgatgtggacatttcacaacaacgatttgtgtaaacatatgtttttacttctgtagtttagattcctaatagtgaaagtgctggcttacattatattttatagcatcatgaaagcataaatgatgtgcagtacactgcccataaagtatataatttgatgagacttaacatatgtacacacttaagaaaccatgccacaatcaaggtaatggacatatccatcacactcaaaacttcccttgtgccactctgtaatttttttataggcttaactttatcagaaattgtcaaattgttttccaaaagcgttgtaatttttatatttccatcaaaatgtatgaagattccagcatctccaatcttcaccaacacttggtgttgtcagactttttaagtcattctgtgggtgtgtagtgcttacggtggtttttgtttgcattttacaggtgaccaaatattcatcacattttcatgtgctttttggccatttatgtattttgttaagtgtctgcttaaatcttgagcccatttttttaactgcgttagttgtcttattattcatgaattaagagttcttttatattttggataaaaaaccttttgtcagatatgtgtagtgagaatagtttcctccactctgggcatgtatttttatctctaacaaaatcttttgaagagcaggtttttatttttatgaagtccaatttatcaatttttttatagttagtttaaaaaaattatatctaataaatctttgttgactccaaagataagatttttctcctatgttttcttctagaagttttataagctttagcttttatatttaggcctgtcatccaagtaattactatttgtataggtgtttccaattcattttttttccaatttattttttaaaaagactcttcccttctttaaattacttgagacctttggtacaaaatcatttgaccatatatgtgtgtgggtttatttctgacttctggactccctatagtgttcttttgatttatatgtctaatttgatgccaatattatgctgttttgattgctgcagctttataaaaagtctagaagccaggcaacatccattctccaacttttttttttcaaggttattttggctattctagatgctttggattttcatatgaatttaacaatcagcttgtcaatttcctcaaataagcatgtgattttttttttcctgagacagagtctcactctgtcacccaggctggagtgcagtggcatgatctcagctcactgtaacccccacctcctgaattcaagcgattctctgcctcagtctcccaagtagctggggctacaggtgtgcaccagcacacccggctaatttttgtagagatggggttttgccatgttggccaggctagtcttgaactcctggcctccagtgatccatacttcttgaactcctatagtgctgggattacaggcatgaggcaccacacctggccagcctgctgaaattttaatcgggactgcattcaatttatagatcaatttggtaagaattgatgacttaacaatatcgtatcttccaatccctagtcatactatattgctccattcatttaggcctcttttaatttctcttggcaatattttatagctttcaatgtagatgtcatgaatgtctttgatcagatttacctttaaatagtcgtttttaaaataaacctcatacttaaaagctttagatttacagaaaaattgagcaggtagtagaggaagttcccatatatcctatacccaatttcccgttattaacttcttacgttagtatgttacatttgctagaattaatgaaccaatattgatacattattattaactaaagtccacggtttgttgagatttatttagttttaaactaatgtccttcttatgtgccagtatgccatccagaatgtcatgttatatttagtttatcatgtctccctaggctcctcttggttgtgatcgtttctcagactttccttgtttttgatgaccttgacagttttgaggagtgctggtcgggtgtcctgtagaatatccctcaaatggattttttcctcataatcaaattaaggttatggattttggggaagtaaagtgccatttttatcatgtcattcaagggtacatgatcaatataacctatcactcttgacgttgaccttgatcacgtagctgaggtagtgtttgttaggtttcctcaccctttttccccttttctcatattgtactctttggaaggaagtcactatgagtagcccacatggaggaaatagggaattatatcccatctccttgagggcagaatagctataaaaattatgtagaaatatttcatattttcaatgttactaatattataaataatggtttttatttttcatttctgattgtgtatttatctattttgttttttaggtttgatcagtttttgctttatgtatcttggagctctgtttttaggtgcatacacaattaggattgttaggtcttgttagtgaatggatcctctataattgtgtaatgtttcactttatccctggaagttttcattgacctaaagtctaaattgtctgataataatgtaaccacatcagccatacagtttttctttttattgtggtaaaatatgcatagcataaaatttactgttttaactgtttaagtgaacagtacagtagtgctaagtatgttcacaatgttgtgcaactatcactactgtccatctccaactttttcttcatcacatactgaagctccgtacccattaaacaataacttcacatcctctctctccctagccccgagtaattgctgttctaccttctgtttctgtgtatttgactatgctaagtacctcgcataagtgaaatcatacaatatttgtccttttatgtctgacttctttcacttaacataatgtctttaagcttcattcatgttatcacgtgtcagaatttaattccttaaggctgaataatattctgttgtatgtatatactacattttgtttattcatttatccacaaacatttgagttgttgccaccttctagatattgtgaataatgctgctatgaacattgctatacaaatatctgttcaagtgtctgctttcaatcattctgtgtatacacccagaagtggaactgttatatcaaatggtaattttatgttttttttttttgaggaactactatatggctttccacagtgacaacaccattttacatttccaccagaaatgcacaaagtttccaatttctccacatctgtgccaacacttgttgtatcagcaatcttttgattagtgctttcatggcacatatttttcatcactccattttcagtctctctatataattatatttaaagtgagtttcttatatatagcttatagttgggtcactttttttcgttgttgttgtttgtttgtttatttgtttttgagacggagtctggctctgtcgcccaggctggagtgcaatggcgcaatctcggctcactgcaagctccgcctcccgggttcatgccattctcctgcctc[211 bp omitted]caaacattgtctttatgtagttagacacttcacatttaatgtaattatttatatggtttgatttatacctaccaatttattatttttgtgtttgtctctttttgttcctatgttacctcctttctttcttcttttggattatttgaatttttttaatgctctatttttatttgctttttttttttttttgagacaagagtctcactctgttgcccaggctgtacatgttatttttaaactacatgactttggttttatcttttgttttgtttgatttagtgttgctttagaaacccatgtatacatacctaacatattgtggactattttgagccaatagtttatggcttcacataaaacaaggaaaacttacaactattgagatctgtttatcctcccctctttgtgctatagtgtgtgtattatatctacatgctctgaaaaatcccaccaatactttaaatttttatattcaaccatcatatatattttaaagaatttaaaagggggggaaatattgtattatgtgtaccaagtttactagttctgtttctctgccttcattcctgaaactttcctctgatattatttctcttcagcatttcttttaaagtatatctgctagtgatgaattctcttagttttcttttgtctgagaaggtccttattttatttccatttctggaggatattttccttgaatatagtgtctggattgacaattctttactttcagcacattaaaatgctgttttactgtcttctgacatccagggtttctgataagaaatttgcattcatttgaaatgttgttgccctatttgcaatgtataatttttctttaaacgctttcaaacatttttttctttatctttgatattttaatagtttcattatgatgtgctggggtatggttttcttcatttttaacatatttaggttttgctgagttttttttcaatctgcagatgtatttcttttattaaattggtgaagtattcgactataatttatttgaaaagtttcctatttcaatacctttctcctcctcttctggaattccaatcatgggaatgttagatcttttaatgttgtcccaaatgtccttagggctcaattcagtttttctatttttgctttttctcctccagattcgatattttatactgttcagtttttaagctcaatgagttgcctttgtcatctccattctgctactgactgattttaaatttcagttattgtattttgaagttctgaaatttccatttgcttgcttttatagtttctagttttctgacaacttttatatttccatttatttcaaatgcttacctatacctcatggagaatgattacaataacttttaaaagtctctgataatgcaaaaatctagaacattcaggggttggaatctcttgaatggcttttttcttgaagttggtcagatatacctgtttttctttttacatgtcaagtaattttggattgtatcctgagcattttcaatatgttaccagattctggtcctattaaaatctatagagaacattgagggttttttttttgtttgttttagcaggcagccaaccaggttaatttccttttttttttttttttttttttttttttttttcagatggagccttgctttgtcacccaggctggagtgtagtggcgtgatctcagctcactgcagcctctgcctcctgggttcaagcaattcttctgcctcagcctctcaaataggtgggatcacaggcacatgccaccacacctggctaatttttgtatttttagtagagatggggtttcaccatgttggc[132 bp omitted]tgttagttctaaaaactttgctgtgctatttgggtatgccactcagtgcgccactcagggattagctgatttctgagcaatggtttataacatagttcagttctcaatgtattttctatgttcctttgggtgtgttatttgaatgtgcagcttagtgatgagcctttaaattgtgtcagttcatccacaaaactgaggtatccccttctccagctctgtcttctgaatcttctctcacactctctggattctaagggctttcttcccaagatcctttgacccaaaagatgagattctctcagagttttagcctcccaccctgtcacccttggcttactctggtgagagaaaagagaagtatatgataactatccctccccacattttgaacaacagaaacctcttttttttcagtttctctatgtagacacatacattttcactcaggattttacatgcccatatgcactaatattagtgcagttccaccatcagtgctggcattgggaagggccaggaaaaaaaaaagagatgaaagggagtttcccccgtacattctgactcacagaggccctctttctagttttctggccagaaagatgagtttcttttagaattgtttcaagaggaatgcttcctggatttgcccatttggtatgatgttggctgtgggtttgtcataggtggctcttattattttgtttcttcaatagctagtttgacagtttttaacttgaagcagtgttattttattaaaagccttttctgcatctattgagataattttgtggtttttgtctttagttctgttatgttaatgaatcacatttattgatttgcgtatgttgaaccaaacttccatcccaggaataaatcctgcttgattctgatggataagctttttgatgtgctgctagatttggtttgccagtattttgttgaggatttttgcattgatagtcatcaagggtattggcctgaagttttccttttttgttgtgtctctactaggttgtggtatcaggaggatgctggtcttatagaatgagttagggaagagtccctcctcctgtttcttgaaatagtttcagtaggaatgctaccagctcttctttgtgcatctggtagaatctttggctatgaatctgttggtccagggcttttattttggtaggctatttattactgattcaattttgaagcttgttattggtctgttcagggattcagttttttcctggttcggtcttgggaggatgtatatgtccaggaatttatgcatttcttctagattttctattttatatgcatagaatattcataatattctctgatgattatttgtatttctgtgaggtcagtggtaatattctccttgtcatttctgattctgtttatttgaatcttctcccttttcttctttatgagcccagctaacaatcttttttttttttttttttttttttttttttaaaaaaccacctcctggattcgttgatattttgaatgatttcttatgtctcagtctccttcagtcatctctgattctggttatttttgtcttctgctagctttgggtttggtttgtgtttggttctttagttcttttagttgtgaccttaggctgtcaaattgagatctttgtaacttcttgatgtgggtgtttagtgctataaatttccctcttaacactgccttagctgtgtcccagggattctggtatgttgtgtgtttgttctcattagtttcaaagaacttctttatttttgctttaactttattatttacccaaaagtcattcaggagcaggttaattttcatgtaattgcatggttttcagcaattttttaaagtcttgatgtctatttttactgtgtgatggtccaagagtgtgtttggtatgagttccattaatttgcatttgctaaggattgtcgtatgtctgattgtgtggttaattttagagtatgtgccacgtggctatgagaagaatgtatattctcttgttttggggtggagagttctgtacaggtctattatatccatttggtccaattttgagtttaggtcctgaacatatctgttaattttctacctcaataaagtttgtaatactgtcagtagggtgttgtagtctcccactattattgtgtgggagcctaagtctctttgaaggtctctaagaacttgctttatgaatctgggtactcctgtgttgggtgcatatatgtttagcatagttaggtcttcttgttgaattgaactctttaccattatgtaatgcatttctttgtcatttttgattttttttttggtttaaagtctgttttgtctgaaattaggattgcaacctctactttttcctgttttccatttgcttggtagatttctcttcatccttttattttgatccgtgggtgtcactgcatgttagatgggtctcttgaggacagcataccaatgggtcttggttctttatccagattgccactctgtgccttttaattggagaatttagcccattacattcaaggttagtattgatatgtttggatttgatcctgtcatcatgatgttagctggttattatgcagacttgtttgtgtggttgctttatagtgtcactggtctgtgtacttctgtgtgtttttgcagtggctggtaatattatttcctttccatattttgtgcttccttcaggaactcttgtaaggcagatctggtggtagcaaattccctcagcatttgcttttctgaaaaggatcttatttctccttcacttatgaagcttagtttggccagatttgaaatcctggcttggaatttcttttctttaagaatgctgaatattgactccccatctcttttggcttgtaagctttctgctgaggttcactgttagtttgatgggcttccctttgtaggtaacctgtcctttttctctagctgcctttaacattttttttctttcatttcgaccgtggagaatcttttggttatgtgtcttgtgggtgatcttcttgtggaagtatcttccagtggttctctgcattccctgaatttaaatgttgacctctctagctaggtggagaatttgtcgtgggtgatatcatgaagtatgtggtctaagattctccacatctctttcaggaacaccaatgggttgtagatttggtctctttacataaccccatatttcttggaggttttgttcattccttttcattaatttttctctatttttgtctgactgttttacttcagaaagccagtcttcaagctccaagatttttttcttcagcttggtctattctgctattaatacttgagattgcactatgaaattcttgtagtatatttttcagctctatcaggttggccacattcttttctgtagtggctattttgtctgtcagctcctgtatcattttattgtgattcttagcttctttggattgggtttcaatgtactcctgcatctcaatgatcttcattcctatccatatcccaaattctatttccatcatttcagccatctcagctctgttcagacccttcctgaagagctagcatggttatttggaagaaagaagttactctggctttttgaattgacaagagttcttgagctggttatttctcatcttcatgggatgatgttcttcaatctttgaacttgctttcctttggattatttttttccttttattctatttgatatccttgagggtttgatgtggtataaggtgagttcagctgactggcttcatttaaggaagattttagggggccaatgctcagctctcaactcctggactgcatgttgtaactctggtgggcttatatcgggccctgactttgttctctggattctcgaggttgggaacgaactacactggggtggccaaggtgttcccaggctgctggtcactgcactacaatggatggtgccaaagcattttttagtgcagtggcagcaggatttgtcatcattctcacatgccagctgcagtggcagtggcaacatggtggggtgcatgctcatcagctgtggcagcttgctagtgggtaccgggatgcctgcttctgtgtgagcacttacagcagtggtggaggcagcatggctcaagggggcaggggggccccccactggtgactgtatgtgtagtagtgctggtggtggtgttagcatggggatgaggcactggcttctgcaggtctgtgtgtgtcccctgtgcatgttcatatgttatttaacctacactccatatttaaatttattctgtttttaatttaaattccttgtaattgatttgcctccagtttagcccacttttatgaattgtttttaactgtcacgtttctcctgtctccattaatctggcatgattcttcagctttctctttttgctcatggtgtttttgatactattttaatgtatggatatactgcattttctatatcaatagtaatcaaaagtaatgccatttttaatagccacacataaagtcaaatacctaggaattaaccaaaaaagttaaagttgtctataataaaaactataaaacactgacaaaaaaattgaagaggacaccaaaaaatggaaaaatgttccatgtttatggattggaagaatcagtaacgttaaaatatccatactacccaagcaatctacagattcagtgcaatctctgttaaaaataccaatgacattcttcagagaaattaaaaagcctcaaatttatatggaaccacaaaaaaacccagaataattgaggctatcctgaccaaaaagaacaaaaccgacttcaaattatactacagagctataataaccaaaacagcatagtactggcataaaaacagacacagagaccaatggaacagaacagagaacagaaacaaatccacacacctacggataactaatttttgacaaatgtgctgagaacacatgaggaaaagacagtctcttcaataaatgatgctgggaaaactggatatccatatgcagaagaatgaaactagacctctatttcttaccacataaaaaagcaaatcagaatggattaaaaacttaaatctaagacctcaatctataaaactaataaaagaaaactttgggccaggcgcggtggctcacacctgtaatcctagcactttgggaggctgaagtgggtggatcacggggtcaggagatcaagaccatcctagctaacacggtgaaaacctgtctctactaaaaatacaaaaaattagcctggcgtggtggcaggtgcctgtagtcccagctacttggaaggctgaggcaggagaatggtatgaacccaggaggcagagtttgcagtgagccgagatcatgccactgcactccagcctgggtgaaagagcgagactccacctcaaaaaaaaaaaaaaaaagaaattttcaagaaaaaagaattattttacaaatgtataaacaatatttgaaaaatgagggaaaaggccaaaaagccattagtacagtaggcaaaaggtttgaacaatttaccaataataataataataataataatcatggcctttgaaaatatgaaaagatgttctatttcatttacaatacaggaaatgtaaattaaaattacatcggcatactatcagttttagcctcacatcatcaggttatactaaacattttcctcttttcagttctctactgatcctcaagcagtaatttcttgtcagttccttgaagattttatctccacctttgttcactctccagtaatacttctgtaataattggggatatttcaatcaggaaatcattgtttatgtaatatttttgcttgaagactcaagagaaaggtaaggacgacactcagtgcaggagtccatattaccacataggcgtttcggatgggggattcccttctccggggacttggaagaagtgtggtcaagaagctatgtgtagttgcaacacttccccctggagggtaaaactgtgaacgtttactccttgggcattctgggaagtgtcccaacggtcggtggggttgcgggcacttccggtcaggcaggcggatccggggaattctgggaaatgtagtccagacgctctgtggagtcgcgggagctacggctgcgggagttaccctttattctgtgatattttgagctgttctgcgtctcgcaggcccttctgaatttcctggacctactctcggaaccctcaacgagctagcgatagatttagaggaaaggaagcaccgtcggaaagcaaaggtttggaagggtgagggcggcggtttgcgatccccgcggcagagccttcttgcgtttagggctgtcctagcatcccgagggactcggtcctgtcacgtttcgccctatttgggggtttctggggctctcagctcgcccaatccgcatccctccactactggcgcggggccgattcccccggtacaacgttggggtgttacttaatctccctgggactctttttgcttttctttaaatgggggatattaagaccttcctaatagaattgtcttgggaattgaaagaggtaatataaaagagtcttaaaacagtttttgttatagtgaatggcgatctcttgttaatttcctgagaaatggtcaggtccctgggctggtgtcagagctccagctggctcttctctctgatccctgcagaacgctggaaaattctggacagtctttgacc[367 bp omitted]ttccacagaaggaggggagggtcttgaccgttttgtcaagagtggtgacacaaccatggtattttgtagcattgtttccgcatcctgacttctctaaaaggattgcttggaggtagacggagtgactccttgactactgacaacaaagctccacgcgagtgtgacttgtcatttttcttttacagtaacgttcacatctattgtaggatgctgtaatcgggcatgggcattgataagaaagtcttaattgctatcttcaattctaagggctttatacaaagaaattcacgtacaccacatggtagctctgtggagaggtactgccatttcgtctattaaagatgagagtgaaacaaagggagcaggagttatttgcccatagttgcccaagtaataagaagtggagccggggttggaacctttgcggtccaggtcagagcccaagctgataatttctgggatacattctcactgaggcagaggaactagctggaatcaggtggggaaagcaagttaggacttgattggagggaccttgagagcaaggctcatgggcttggacctctctaggactcttttaaaactttgtcaactattttttttcacttattacacatattttgtattcttatagaaccatatcattatggagcattcagaaattgcagaaatacgacaagaaaaaaagcttaattacctctgaatgcaggatataaagatagtaaccattaagcttatttttatttatttaattcattttaaaattttctgagacagagtctcactctcatgcccaggatggagtgcagtggcatgacctcagctcactgcaacctccacttcccgggttcaagcgattttcctcccttagcctcccaagtagctgggattataggcacacaccaccccatcttttagtaaagacgagttttcaccgtgttggccaggctagtctcgaactcctgaccttaggtgatctgcccacctcagcctcccaaagtgcagggattacaggtgtgagccactgtgcccagtcattaagctttttttttttttttaatgcttattgccttattacaaaggatattacaaaagctacaggtgaagagatgcatagggcaaggcatgtgggaagggatgcagagcttccataccttcctgggtatgccactctccaggaacctccatgcattcagcaatccagaagctctcagaatccagtcctcttggttttttatggaaacttcattgcatagacacgattgattaaaccattggccactggtgatcagcttaacctttagcccttctcccttcccagaggttggggagtggggctgaaagtcccatgcctttactctctaaccatgcattggtctttcaggtgaccagccacatcctgaaactacctaggggttgccagccatcactcaattcatgagtatacaaaagatcaatttggagattctaaggattttagttgtatgccaggagacatgttagtgaccaaatatgcatttaggttatcaccgtacatacccatctttgaacccagatcctcttacataaaaaggatttacaactcagccaggcgtggtggctcacacctgtaatcccagcacttttgggaggctgaggtgggtggatcacctgaggtcaggagttcgagaccagcctggctaacatggggaaaccccatctctacaaaaaatagaaaattagccaggtatggtggcacatgcctgtagtcccagctactcgggaggctgagacaggagaaacacctgaacctgggaggcaaaggctgcagtgagcaaagattgccccactgtactccagcctgggcgagacagagtgagactccgtctcaaaaaaaaaaaaaaaaaaaaaaggatatgcaactcaaaagataccaccacattatcagaatcccatttagtcacattaataagtccagtccagtgggtgaagccactcaggtttgctggcttccatttgatatacggttctaaaagtaggagtggtcttagcaaaacatatagcttcaccatttcaggcatctggtgtaattgagctaagagacagtgtcatcttaaggtattaatatactactggagttctctcaattcataactcatttattcattcctttaccctcagctaccgtttctccttctttccattaatacacagactttttcacctttggaagggacattagaatcaccactgtgccggtctagactgcagacagcaatactagtctagcaaatgcttccccctcagttcacctccattcagatagggtaaggttacttaggtgcagaatagtggactgtttttaccatcaggaaatacagttatattcactgttagcccaattttgccagatggggtgaaggcacaacccatccccatcgggccctcaggaattctgacacaagttttagaaatttagttatggtttcttgcttaggaatcatccctgcttccaacacttgtagttgtagccctgatcctgtgaccactacatcaggtatggggaaaaaaattgaggtaatatggggaagaaggaaaaaaaaaagtgtaatcattatactggtgttctcctcccttggcaagaattgcatagtcatcccagcctcctttcccaccaggtcttccccagatcaaccagaaaaatagagaaattgctatcccactgacattgggtatgagcacacacttgcgaaggtgtgtaagccagccctgatgcttttatctctttgttttagacaatcaatgttttaattgcctgttccacttccctatcaaactattactctgaggaggatcgctctctattcattgctggacattgtgggctctatatctagtgtgtttcttggtcttctttcttctttttttttaaaaacactctgaacatttggatcttccaccatataagcaaaacccggtcaagaatcagtgtctactgctgtcaagacccatctgtagcctcccagggctaccagcatcacttgccagctacactcaggtccttcccaccagggaatctgtttcacagccatcttcactgtgtcatttttgctgacaaacagaacagttttcatctgcattttgtgcctcagagggtgcaagaacatgtctcgatttagcccatctttgcactgctgcactactcccatatccactaatttcacggacccaggcagccactgcaagggagcacatggggatatctgcttgttgattcaaaacctgaagggggctctgccaatgagcatcaacaggtcctactttaatgcacaccccctacttcaaatttctgtaagttcatgcctcacatgggcatcccctttaatagaccagatctccactgctcttctgcctgagtgtatggccaggccatttgccactgcccatgagtcagtaaagatcccaaagtgggtttctaccaccattcagtttttcatcactgctaggaaaacagcgtgtaattcagtgcattgagctgatatgtttttaccttctttgatcagggtggcatccttccaaatcatatgttcattcactttggaactgccattcacaaaatgagcagctctttgctggtcagttgagagttgtttatagcttctcacacagttccagagtcagtctccaggtagcatgactctgtataaactatttccattttattatggaactcttctgggcactgccatccccattagaatgttttcctaacattacctaagagagcataggtatttcaggtgtcaagatttttaatgtctttcagtcatagggctagcctcagttaatgccccatagtggggtagtaaatactcttcaagtcaaaattttctagtccaaagtctcagtaattgtcactagaaggcactcacaggcttctgtcataagccccagcctacattccacatggagctatcaaaacagaatttgtccataccagcacttcagattctattctacactgtgcggactcaggcaatcttactggttcccatttagcatgtccaactaatattgcttgaagggtagatttatatgccttctgttttgtaatgctagtcaggagaaacgttccctagtcagatacaatgtccattcccataaaacatttaggtaaagaagatacaacttcttaatataaagtctgtttaaatagtccaactttcataatcctatcaacccttacatttttatgttctagtcccaggaagttttccaccacttgcccaccccaacactccccccagccattttatcctctcttatgcgaaacactgagagtcagcaggaggggattgagccaaaggaccctggctcttgtcaatctttatcttgactaatctacttgactactgcccccaagcaattccaagtggggtttctcatcataatctttaccttcggccttttaaaatttctccaaactggagtaaatacaacaaacttatttgaaaccctttaatattgggggatcagcagaggatccaccaaactttcaatattattgtgttcagacctttgttttagcctcatcaatttccattttattttttccatttcttaataaaactgttaaaagtaaaaaatcttaaataagtcaaacaatttaattgagcaaaaaacaatttgcaaatcagacagcccctgagctagaatagattcagagaagcttcactgctaccatgtggttgaagaagatttgtaaacagaaaaaggaacgtgacattcaaaaagtggaagtgaggaacagaaacagccagtttggttacagctcagcttttgccttatttgatccttgtttgaacagttggctccctttgattggtcaaaactcagtgactggcacaagagtaggttacagtctgtttatacttccagttaggttacagttcgttatatatggataaaccttttcttatttttatttttattttttattttttttgagatggagtcctgctctgtcgcccaggctggagcgtagtggagcaatcttggctcactgcaacctctgcctcctgggttcaagtgattctcctgcctcagccttccaagtagctgggattacaggcacacaccaccacacctggctaatttttagtagagacggggttttaccatgttggccaggctggtcttgaactcctgacctcaggtgatctacccaccttggcctctcaaagtgctggtattacaggcatgagccaccataacccgcctggagaaacctttatacctaacttaaagtatgtaagaaagcagctttaggctaaacttaatttaacataatgatctaaagattttcaccctgttggaatgagtcccatgactctctctctttcttcttagtttcacctttatcattgttttttaaatgacctttaaaaaatttctagctttctgggatgagtcgtttgactctgccctctgcctttttcctcttgctaattaacctaatgtttttattaacatctttaatatctttaaagggaagctgagacagcaaatctgataaggcttctaggactgttgttcagttttgcaagagttaagatgtcaactaataaataaaatcaatactgagccacaaacaaaagaaaagatgttttaagtggggtcttgtgaattgcaatcaagaagtacagatctagcagtcagctaaatcatttcctgttctatccaggcaaggttgggcaggggcttataaatgtttactgtaagtttacatatctggaaggtattagtacagtccatgattgatgtcagttggttagcaacttaggatgtctttggttgatgatcaatctagttcagcatagctgtttccccaagagtttcgcaatcaggccatgtataaacaattccaatcaaatgcagctggttttacaatttggcccagttaaacaggttaaaatccatctggatgtgtacataactgaggtccaactccacatgcctctttttagaaacttctgacataaccatctccattttgagttttctttttacaaaagtcacgtggggtatccatgcgaaaggggcccccttagccacagcatttaccatgacctgggtaagaagcatattcagcagatgaatatcccagtcatcataaattcagtcccacgtggcttgcatgcggtatatcagctgcatcatctggggtatcccaccgagcatttatagggtgagttgagcagtccgctttttcagggcaagcagacattaccatgtcttttatccagttgatcaggctggctgttcccttgggaacaatctgttaacattgatagtgagattcaggcaatatggttaaatattgagtttattcaaacacaaaattttaagatgtccacctgggaggacacggacttcaaaagattggataagtgctctgaagtggaaaggtttgagagtcattatgtaggcagggtctaggaagcttaacaggatgtcagcattttctatacaagattaatgcatagttatagcaattcgatagcagtgtttccttttattgggaagaacgtatttaacattctgcattagagatgtaatagtcaaaggggtcttttatctcagacaaagaatcttttatcttagatgctatctggtctgagccaggaacaagaaaacaaagaaggaagttaagaggtcaagctcagtgactcagtttccttcgggcctaacaacttttagaagcccaaaatagataagactattgggtttttggttgttttttttttttcacatctcctgtgtgtctgcatcaggtgtttaccgtctgtaattgttgcatcatgtatcaccatctgtaattgtttcatagtgaactgtgggtcctacataaacccaaatatgctcttcaatgcaacatttaaaaccaaagatgctgctacttagtttctctcacaatccagttgagtaaagattccttaagaagctacaaaataaacaattccttcacactgtacactgtagtttcagtttcttggttttacccttcccatacactgattgccttttggtaaccacaggtcttagaggtacttactgttgtcctggtatattttttcccttagggacagctttgaggcaagtggctaaagcttagattcactaaaattcgaacttggtcaagcatcagagtccaacccagtccttttaattacatttgatatagtttggatgtttggtccctccatatctccagtgttggaggtggggcctagtgggaggtgttggatcctgggggtgggtccgtcataaatggcttagtgctatccccttggtgattagtgagttcctgctcagttagttcatgtgagatctggttgtttaaaagaatttgggtcctccaatttctctctcttgttcctgctctcactttgtgacatgcctgctcctacttcaccttctcccatgagtgaaagctccctgaggcctcaccagaagctgagcacatgccagcaccacatttcctttacagtctgaataaatgtaagccagtgaaacctcttttctttataaattacccagcctcaggtattttgttacagtgacacagaaatgaactaatacagaaaattggtactgaggtgcaatgcattgctataaagatgcctgaaaatgtgaaagtggctctggaactggctaatgggcagaggttggaaaaagtttggagggctcagaagaagataagaagatgagggaaaacttggaacttttttttttttaactttttcactgagccatgggaacttcttacagactgattaaatagctgtgaccaaaatgctggtgggaatatggacaatgaagtccaggctgatgagatctcagatggaaatgaggaagttattgggaactggagtaaaggtcacccatgttatgtcctagcaaagaactttgctgctttgtgttcatgccctagggatttctggaagcttgaacttaagagtgataacttagggtacctggcaaaagaaatttctgagcagcaaagcattcaagaagtggcctggctgcctcactgcttcaaacagcctacaattatatatgggagcaaaaaaatgacttaaagttggaatttatatttaaaaggtaagcagagtataaaagtttggaaaatttgcagcctggccatttagtagagaaagaaaaagcatttttaggagaggaatacatgtcggctgtggagcaaccactcgcaaaagagatttgcatgactaacagaaagccaagtggtaatatctgagacaatgggaaaaagacctggaagacatttcagaagtcttcaggaaagtccctcccatcacaggcctaggggcctaggagaaaagaatggttccaagggccaggcccagggaccccctgccctgagcagcctcaagacattgtgccctgaatccggccactctggctccagcctcagcttagagtgccccaggcgcaggctgggttgcagctccagagggttcaagccttgatagttgtggtagtttccacattgtgttaaggctgcagatgctcagaatgcaagcatgaaggaggcttggcagcttctacctagatttcaaaggatgtatgagaaagcctgggatcccagtcagaagcctgccacagtgggggagccccaacagagaacctctaccagggcagtgccaaggagaaatgtgagggctccccacagagtccccactagggcactacctaatggatctgtggtaaggggaccactgccctctgagaagtggtcctgagaccactgctcagtcatatcacttggctgcccaaggccttgggagtctatctcttataccaggatgtgggacatggagtcaaggattatgttggagctttaagagccctggctggagtacagtagcacaatcctaacttgctgcagcctttaactcctagactcaagctatcctcctgcctcagcctcccaagtagctgggattacaggctcaagccacagcacctgcctcttcatatgctctttacccaaattttccaattatttacattttgtattttgctttgttaacacccatcagccaaataccactgggaacaaacttataatgagaaacaacttattgtagctttctgcatcaaggaaccccacatagcaaggtgatcatggagtgtcttggtaagaggcatttaggaagggctggctatagagtttcatataagatgctaggtagtattagatataatattaagtaatatcactattaaatactagatatcaattaaaagactattaatattagttaattctgttacctattagatatggctagacaccatcatcttttctatccaaactcccatatttaaatttgttgtgctttttaaagttcttgtaactgttttcccccatcccccagtccaaagtccaattttatgtactgcttttaggtgtcacatttctgtagtcttctttaatctagaaagattcaacaggctttgtctttttattcttgacatccttgaagtatataggcaaagtattttatagaaagatagtcatttgggatttatgtatttcatgtttaggttcagattatgcattgttggtgtggataccacagaagtgttgaagtgtcataacaggggccaaatgatgtctgtttttcccttcattggagatctcaactttgttcacttggccaagatgatatctttcagatttttccactgaaaggttactttttaattaaattttgaaaataaaaacgtttcttacgggagatacattattagtgggcattatcctgtaaagattagcttccacttctccctgatttattaatcagtttcttcaactataaatattctatcaatatggacccacaatccagttaaataacatgtagattaactgttattatttccaactttattgaggtgtattttacatgtcatagaatttacccatttcagtcgtacgatttaataatcttcaggaactttgaacagtggtgtgaccgtcatcataattcagtttagatcattttcgccccccaattggactccttgtgcttatgtacagttaaacctcattctcacctcaaatctggagcaaccactaacctactttctctatatatacatttgcttattctggatattttataaaattgaattttacaatccatggggtttttagactggcttctttaacttagcataatgtttccaaggttcatacatgttgtagcatgagccagttcttcactcctttgaatttccaaataaaattctgttgtatggatatgccatgatttgtctattcatttacccgtaggagggcattttgcttgtttgcagtttggggttatgagtaatgctgctatgaacattcatgtgctaattgaaaatacttgtctatgttggtggtcggcattcctagttaccatttcctgtctgtttttctgcctttcctggcactttccaggcatgatttcaccttcacttgaactgcttcattcaggactctgcaaattccctgaagtagaaggaaaaatgaccacattcaaagtgagtagggcttgcctctcttgctgttaaaattccatcttactactcatattgtcacatttttatctgtcttgggaagactcaaggagaacaacaagcatttgagggcattttgtttgccagatgcttcctttgctgcttttgaattgactttccgtttggttttagttcttgttttcttacataatttcttttctgtagtagataaaatagtaggaatggataattctttcacttcactacttctctgctcacaaattagctgtttttatcttgtattcttcatcatgtacattcataactgtatttttattgatgacatacctctaattttaaattgtgctcgttttatataatattatataatgttccatttttatattggtatcatagtcccaatgaattaatgtaccttcttatttttaactacttcacactcatagacatttaggtggtttaggaattttactgttttaagcaacactgctgtgacagctttcctatatataaccccttccccccaaaattaattctgaaaacaagataggatacttttgacatgtattacattggctgttttatagatggtagattatttcaacagggcacagcacatgaggctctgactgctacttcccacaaatattgttgttggagttttcacacaggaagagctagattctgtgtttgccatgccttactcataccttgtatgcatgttatttattggtctcttcttattcctttatggagtaagcagttttaccaaagtagtaggtaccttcatttgaaatgtccagtgatactggaagattggccaatcacttgtgttgtgttactatatttactcagagaagcagaatgcaggttttagtctcatcttcctcttaaactcataaaatatgagaaatctgctcagattcacataggcaaccaaggtcaggaatgttagccattctgctcatttataatcaaataagtgagaatgatattaatacaatgaattcttcttcctaatcatattaccgaaaccatgggaatatttacaacctgctcttaaccatcataaggagaataagggtacttgtgttcactcggaagagtgggaagtaggtaaaaaatttggaagaaagtatgaaattatgtaatcacaattttaaatgtgtttattgacattctcattttcatttgacattattttaaataatcaggagaataaagtctatataaaattattttctttacaggattgataataaaaaatatttaatatgaagtattcattatttaaataaaaagagatcatttttgccctggaatactttgcagatatgaaatgagatgaaataaataacaataatgacagttataataaaaatagataatatttattaaatacttagtctttgccacacagttttcccaatgctatatatatttccttctttaatccttgaaaaaacgataccaggtgaaaatcattatacagacaggaaactaatgcatgtaggtgagcttgtccaaagccacacatctaggaagggacaaagctttgggatgtgctctgaggcatgatggttccatatcatgacattgaatgatgcaactaatgtatgtagtttgtgccttgagcatatagaggatgcaatgcatagctgtcccacacaggtcaccatatactggttagtttgacagatactaaagaaaagttaacaacatccacagtttgagtatgaaaggaagacaatggaagagaggaagacaatggaaattatcaaagttgggactaaacttctaaatgttactggggcaattggcaacaacacactaaaacctaaatacctgtagcccaggaggcagcatgtagagtcctagagggctacttacaagtagactcaatgactgcacaaagtaaaagtacaggacttcttttatatcattgcacttctgatgaagctcatgaaaatctgcgtgtgtcattgtcaggatataggcagaatgagtgggaaatctgtatgttgacctacatccctcaagatctaggacaacttaccacacctgtcccctttgcctacttagtgccacccttctttgaataatcattggtcataagatttaggttttgtatgttggatattttaggaggcagtgacattcaaggatgtggctgtggtcttcactgaggaggagctggggctgctggaccctgcccagaggaagctgtaccgagatgtgatgctagagaacttcaggaacctgctctcagtaggtgaggacaggcaccctctgtaacagaatgttaggccccaggaatggctttgtattccaagtttgagtatgcattgggaacctaaatttccagtaaattttccctagatattacctacaatgggttggaattaagcatgtcactgtgtgttcacagggaatcaaccattccaccaagatactttccacttcttagggaaggaaaagttttggaagatgaagacaacaagccaaagagaagggaattcaggtaagaaccaagtaactgtgcatccttgtacatgactcttccatctgttttacttctgtccatgcctatttccatcaccctggtctaaattgccaaacttctttcataacttattgcaactgccttccttctttaaagttcctttggcttcattattcatgttcatattttattagtttaataatttatcatacaagattttagactaggaaatttaccagaattagtaacgggttaagtgtatgtatgttattaattatttaattcagtcttttatttctaccaggattttacatatgagatgtgatgtggttctaaattgttctcttgaaaaccaaagaccatagtgcactcggaaaacatgaacttaatgtttcctgttttcattaaagtttaatgccatgtcctaagtgtgaaatcttgaaaacattgaatagggcttcacttgcccacatatattaattctgtgtctttttaggaggcaagatccaaattgagatggagactgttccagaagcaggaccacatgaagagtggtcctgtcagcaaatatgggaacaaattgcaagtgacctaaccaggtctcaaaactccataaggaacagctctcagttcttcaaagaaggtgatgtcccctgccagattgaggcaagactatctataagtcacgtgcaacagaaaccttaccgttgtaatgaatgtaaacagtccttcagtgatgtttctgtctttgatcttcatcaacaatcacactcaggagagaaatctcatacatgtggtgagtgtggaaaaagcttctgttacagcccagcccttcatattcatcagagagtccatatgggagaaaaatgctataagtgtgatgtgtgtggtaaggaatttaatcagagctcacatctgcaaactcatcagagagtccatactggagagaaaccattcaaatgtgggcaatgtgggaaaggcttccatagtagatcagcacttaatgttcattgcaaattgcacacaggagagaaaccttataattgtgaggaatgtgggaaagccttcattcatgattcacagcttcaagaacatcagagaatccatactggggagaagccattcaaatgtgatatatgtggtaagagcttccgtgttagatcaagacttaataggcattccatggttcacacaggagaaaaaccattcagatgtgatacatgtggcaagaactttcgtcagagatcagcacttaatagtcattccatggtccacatagaagagaagccatacaaatgtgagcaatgtggaaaaggcttcatttgtaggcgagatttttgtaagcatcagatggtccacacaggagagaaaccatataattgtaaagaatgtgggaagaccttcagatggtcctcatgtcttttgaaccatcagcaagtccacagtggacaaaaatccttcaaatgtgaagaatgtgggaagggattttatacaaattcacgacgatcttcccatcagagatcccacaatggagaaaagccatataactgtgaggagtgtggtaaggactataaaaggaggttggatcttgagtttcaccagagggtccacacgggtgagagaccctataattgtaaggaatgtggcaagagctttggctgggcctcctgtcttttgaaacatcagagactccacagtggggaaaaacctttcaaatgtgaagagtgtggaaagagatttactcagagttcacaacttcattcccatcagacatgccatactggagaaaagctatacaaatgtgagcagtgtgagaaggggtacaacagtaaatttaatcttgacatgcaccagagggtccacgggggagagcgaccctataattgtaaggaatgtggaaagagctttggctgggcttcatgtcttttgaaacatcagagactccacagtggagaaaagccattgaaatctggagtgtgggaagagatctactcagaattcacagcttcatttacatcagtaagtctatgtgggagaaaagccatataaatgtgagaagtgtgggaagggctttggctgggcctcaactcatctgacccatcaattctccacagcagagaaaaaccattcaaatatgagaactgtgggaagagctttgtacatagatcatatcttttttttttttttttgagacagagtctcactctttcacccaggcctgactgcagtggcgctatctcagctcactgcaagctccgcctcccaggttcacgccattctcctgcctc[221 bp omitted]ggagataatccatacaaatgtgaggagcatgggatgtactacaacaggcacttgacttgatatgcatcagagggtccatatggcagagaaaccgtggaagtttggggagattgccatgtgcttcagttatgcctcaaagtcttcaacttcattggactgttcactttcaagggaaaccttagtaaggtgatatctgtgatagtcttctcaactacaagctcatctgagagttcacaatgggagaagcattaaaaatttgatacatgtggtaagcacttcagtttgagttcatatctcatagcttattacagaatccatgctgatgatacatttcatacagtctcaggagggaaaatatttaagttaaagtcagagtttcagccatagttcagcatacccacgtggttttagaaccactgtagcacagaacctttgtaatttggggcttcattcagaagtttggcaattatagttattcaagagacaggccttagaaagaataggagtttgttcaggcatttacaaatctctaatgatggacatgtcaaaattgatgtcggctagaatataagctgcatttacctttgctgcagaatcttcacaaccttaacactgattggcactttgtatgtgtgtttggtacatgtaagagatgtagaaagagctttggctgggcttcatatcttttgaaatatcagagatgtgatattaaaggatcaaaaggagaaaacatatttcaaaattgtatctaaaagaggaaacctgggatagaccaagatggccaattagaagcagctatggttcatggtactcatacagaggaatgaaaatgacagataaattcagcaccttcaattgaaatatctaggttctctcattgggactgactaggcaatcaattcaacccacagaaaatgaagaaaagtagggtggagttatggcccacttggtgtggcatggagccaaaggaaacctcacccccacccaagggaagcagtgagtgattgtgcgaccctgcgcaggaaaccatgctactcaaggatctttgcaacccacgggtcaggagatctccttgtgagcccatgccaccagggccttgggtttgatacacagagctgtgtggagttttggcagagcggcctctcaggcacacacagagacccaggaggtttacatgctctagccccagaattcctggcaaggtggcagattcatccttatattcccctaggaagggggctgaatccagggagccaggcagcaacattctgtgggccccacttccatggcaccttacaaaacccactggcttggaatttcaaccaaccaacagcaacaggcttcagcctgaaataggagggagctcctgtgggggaaggctggccaccatttctgtggttcagtctactcagcattccagcctgccagctctggagagaccaggttgtctggacaaggagaggatccccctgcccaacacagaacacctgctttgccagatcatgcccagactgctgcttttttttttttttttttttttttttttttttgagatggagtctcactctgttgctcagactggagtgcagtggcatgctcttggttcatggcaacctccacctcttgggttcaagcaattctcctgcctcagcctcccaagtagctgggattacaggcaggtaccaccacacctggctaatttttgtatttttcatagagacagggtttcaccgtgttggccaggctggtcttgaactcctgaccgcaggtgatccgcctgcctcagccttccaaagtgctgggattacaggcatgagccactgcacctggcccagactgcttctttaagcaggaccctgatccattcctccccactgtgtggggtctccctgtggggggtcttcagtcactccagccaggcttatactgacagaaatctaatctctacctcagatggagctcccaggggagtggcgaccactgtctctatggttcggttgacaaagctgttccagcctgctggctttggagagtctgggcaatctgggtgaggaagggtcctcccccaccgcagcacacctgctgtaccaaaagcagttggactgcttctgtaagtaggtccctgatcctgttcctcctgactcagtgagacctcccaacaggagtctctagacacctcctacaggagtcttcaggccagaaactggtcagtatccccctgggacagagtttccaaaagaaggagaaggctgccatctttgctgttttgcagctttcactggtgacacctccaggtacgggaaaaacggaggcaactagggtctcgagcagaccccagcaaactgtggcagccctacagttgctaacagtcagtggcttgactgttaaaaacaggcagaaaacaacaagaacatcaacaaaaagaccccacaaaaaccccattcaagggtcagcaacctcaagattgaaggtaggtaagcccacagatatgataaaaagtcaacacaaaaaaatgctgaaaactcaaaaagccagagcgcctcttctccaaatgactacagcacctctctagcaagggtacagaactgggctgaggctgagatggctgaactgacagaagtaggcctcagaaagtgggtaatgaactttgctgagctaaaggagcatggcataacccaatgcaaagaagctaagaatcatgataaaacaatacaggagctgatgaccagaatagccagtttagagaggaacataactgacttgatggagctgaaaaacacaacacaagaacttaacaatgcaatcacaagtatcaattgtagaatagaccaagaggaggaaagagactcagagcttgaagactatctttctgaaataagacaggcagagaagaatagagaaagaatgaagagtaatgaacaaaacctctgaaaaaaaatatggagttatgtaaaaagactgaacctatgactgattgcggaacctgaaacagatggggagaatggaaacaagttggaaacatactttaggatgttatccaggataactttccaaacctagcatgacaggctaatattcaaattcaggaaatgcagagaaccccggtaagatactccatgagaagatcaaccccaagacacataatcatcagattctccaaggtcaaaattaaaaaatgtaaagggcagtcagagagaatgaaaggtcaggtcccctacaaagggaagcccatcagactaatagcagacatctcagtggaaaccctacaagccagaagatattgggggtcaatattcagcattcttaaagaattctttgccagaatttagtatctggccaaagtaagctttatgtgcaaagaaataagatccttttcagacaagcaaatgctgagagaattcatcaccaccaggccttccttgcaagagttcctgaaggaagcactaaatatggaaagaaaaaaccattaccagccactacaaaaacacactgaagtacatagaccaatgacactataaagcaaccacataaacaagtctgcaaaataaccagctagcatcatgatggcaggatcaaattcacacataacaatactaatatcaaatgtaaataggctaaatgccccaattgaaagacagagaagtgcaagctggataaagagccaagaccgattgatacgccgtgtttaagagacccatcacacgtgcaaagacacacataggctcaaaataaagggatggaggaaaatctaccaagaaaatggaaatcagaaaaaagcaggagtcacaatcctagtttttgacaaaacagactttaaaccaacaaagataaaaaaaaaaaaaaagacaaagcaaggcattacataacagcaaagggttcaacaagaagagctaactattctaaacatatatacgcacccaatagcagaggacccagattcataaagtaagttcttagagacctacaaagagacttagactcccacacagtaatagtgggagactttaacactccattgacaatattagatcattgagataaaaaattaacaaagatgttgaggaccttaactcagctctggattaagcagacctgatagatatctgcagaactctccactccaaaacaacagaatatacatttttctcatcatcacatggctcttaaaaattgatcacataatcggaagtaaacactcctcagcaaatgcaaaagaactgaaatcataacagtctctcagaccatagcacaatcaaattgaactcaagattaagaaattcacccaaaaaattaaaacaaaaatgaaattaactcagaaccacacaactatgtggaaattgaataacctgcttgtgaatgactcctgggtaaatactgaaattaaggcatagatcaagaaattatttgaaactaataagaataaagacacaatgtaccagaatctctgggatgcagctaaagaagtgttaagacagaaattaatagcactaaatgcccacatcaaaaagctagaaagatctcaagttaacaacatcacaactaaaatagagaaccaaaaacaaaccccaaagctagcagaatacaggaaataagatcagagcagaactcaaggagacagagacacaaaaaatctttcaaaaattaacaaatccaggagctggttttttgaaaaaaattaatagactgctaactagactaataaagaagaaaagagagaagaatccaacacaatcagaaatgataaaggggatatcaccactgaccccacagaaatacaagcaaccatcagagaatattataaacacctctctgcacataaactagaaaatctagaaaaagagaataaatttctggaaacatacaccctcctaaggctgaacctggaagaaattgaatccttgaatagaccaataacgacttctgaaattgaggcagtaatagtctaccaaaaaaaaaaaaaaaaagcccaggaccagacaaatttacagctgaattctaccagaggtacaaaaaagagctggtaccatttctactgaaactattccaaacaattgaaaagaagggattcctccttaactctttttatgaggccagcatcatcctgataccaaaatctggcagagataaaacgaaaaaagaaaacttcaggccagtatccctgatgactatcaatgcaaaaatcctcaacaaaatactggcaaactgaatccagcagcacatcaaaaagcttatctaccacaatcaagttggcttcatccccaggatgcaacgttggttcaacatatgcaaatcaataaatgtgatcacataatgagaaccaaagacaaaaatcacatgattctctcaatagatgcagaaaaggcctttgataaaattcaacatcccttcatgctaaaagctctctgtaaactaggtactgaaggaacatacctcaaaataataagagccatagatttcaaacccacagccaatatcatactgagtgggcaaaagttgtaatcattccccttgaaaactggcacaagacaaggaccagccccccgccctttccccactcctgttcaacacagtattggaagttctggccagtcaagtcagacaagtgaaagaaataaagcatattcaaatagagaggaagtcacagtatctttgtttgcagatgacatgatcctatatctagaaaaccccatcatctcagcccaaaagctttttaagctgataagcaacttcagcaatgtctcaggatacaaaatcaatgtgcaaaaccgctagcattcctataaaccaacgacaggcaagcagagagccgaatcatgaatgaactcccattcacaattgctacagaaagaataagttatctaggaatacagctaacaagggaagcgaaggaccccttcaaggagaactacaaaccactgctcaaagaaatcagagaggacacaaatggaaaaacatttcatgctcatggataggaagaatcaatattgtgaaatggccatactgcccaaagtaatttatagattcaatgctattcccattaaactaccgttgacattcttcacagaattagaaaaaaaaacctattttaaaattcatttggaaccaaagaatagcccaaatagccaagacaattctaagcaaaaaagaacaaagctggaggcattatgcaacccaacttcaaactatactccaaggctacagtaacgaaaacagcatagtactggaacaaaaacagacacatagacaaatggaacagaatagagaactcagaaataagaccacacacctacaaccatctgatattcaacaaacctgacaaaaacaagcagtggggaaatgattccctatataataaacggtgctgggagaactggctagccatgcacagaaaattgaaactggaccccttccttacaaacattatacaaaaattaagatggattaaaaacttatgaaacccaaaactataaaaaccccagaagaaaatctaggtgataccatccaggacatagggacaggcaaagatttcacgatgaaaacaccaaaagcaattgcaacaaaagcaaaatttgacaaatgggatctaattaaactaaagagcttctgcacaccaaaagaaactattatcagggtgaacagacaacctacagaatgggagaaaatctttgcaatctgtccatctgacaaaggtctaatatccagagcctacaaggaacttaaacaaatttacgagaaaaaaaaccattaaaaagtgggcaaaagacatcaacaggcacttctcaaaagaagacgtacatgcagctgacaaacatgaaaaaaaagctcaacatcactatcattagataaatgcaaatcaaaaccacaatgagatactgtctcacatcagtcacaatggcaattataaaaaagtaaaaaagaagccatttgcagcagctcaaagtgctgtaatcccaaacctttgggaggctgaggtgggtggatcacttgaggtcaggagttggagaccagcccggccaacatggcgaaacgaacccctgtctctactaaaaatacaaaaaattagctggatgtggtggtgcatgcctataatccccagctacttgggaggctgaggcatgagaattggttgaaccggaggcagaggttgcagtgagtcaaggtcatgccactgcacttcagcctgggcaacagtgaaactgtgtctcaaaaaaaaaaaaagtcaaaaagcaacagttgttggtgaagttggggagaaaaaggaatgcttttacattgttagtgggagtataaattagttgaaccattgtggaagacagtgtggcaattcctcaaagatttagaggcagaaataccatttcacctagcaatcccattactgtaatatatacccccaaattataaatcattctattagaaagatacatgcacttgtatgctcactgcagcactattcaaaataacaaagacatggactcagcccaaatgcccatcaatgatagactggataaagaaaatgtcatacatatagaccatggaatactatgcaaacataaaaagaaattagatcatccaggacatggatggagctagaagccgttatcctcagcaaactaacacaggaacagaaaaccaaacactgcatgttctcacttataagtgggagctgaatgatgagaacatatggacacatggtgggaaacaacacacactggggcctcttggaggggtggagggagggagagcatcaggcagaatagctaatggatgctgtgcttaatacctaggtgatagattgatctgtgcagcaaaccaccatggctcacatttacctatgtaacaaacctgcacatcctgcacatgtacccctgaacttaaaataaaagttgaagaaaaaactaaatcatagtattaaaaaggagaaatcttgcaagaaataatttatggaaacatgagttgaaatgcagggtacactcagcactgcaatgtagacctttattttgattattatcttattccacttggctcctggcttctcctcatcctctgttctcaagtcggattcttattatttgggactctgtctagtgttcccttgattgtatatagtataaatttaacaatcatttgtcacttttctcacaatatgaggtgaaaagattttgtaataacagaccactgcatattgtacaattaagttttttcaacaattttaaggcaggattcacagtaaacacttttttcttttaaaaaattatttttaaggaatagagacagtctcaccatgttgcttggctggccttgaacttctaggctcaggcaatcctcctacctcagcctcccaaagtgcttgaattataggcatgagccaccacacccagcccacagtaacatttctaatgtggcagatgtagttacattgacaaaaatttttctggtaaaggccaggtgtggtggctcactcctgtaatcccagcactttgggaggctgaggcaggtggatcacttgaggccatgggttcgagatcagcctggtcaacatggcaaaaccccgtctctactaaaaatacaaaaattagctggtgtggtggtgtgtgcctgtaatcccagctacctgagaggctgaggcatgagaatcgcttgagcctgggaggcggaggttgcagtgagctgagattgtgccactgtactccagcctgggcaacagagcgagacttcatctaaaaaaaaattcctaataagttttgaattgatcatgatttgtgattctgcgtttctgtgcaggctttaatatgattgccttctaattgctgtagttatttcttttatcagacttctcaggtagaagctttgccaaatttgaaggaaaatttttggcaacctcagtatttcttcccatctctatgaactaccaagaacatttgttggagtttggtgatttcatcatacatattcattattggagcaagagtaacctttacatactcttctttattgttggccataagaatacgttttttggaaagtggtatatggcagtatgtataaggtacaactgttcaacctggaaatcataggatagaaaattacaacattaaaactctgaaaattagtagattacatggatgatgtcacttaattttaaaatggaaagaacaagtgttcaaccacaggaatttgtatgaagtgcatttattaatataaaaacacaaagccagtaaaatgatgacatagatgtacaataaaaagagaagagcataatgtatgccttagggaaatcctattgtagccttcataacaaactaagtgtctttgtgtttctgggtttgtttatttggttatttttagtgtgtatgtacatcatttgtggatgaatattctgacattttccctggcaatgagtatttgctggaatttttcattttataattttatgcattttaaatttctcattgaacaccaattttaccaaagcagttatgtgatgaaaaatttgaaaaattattaatattaatcacttacctataaggactctgaataagattgctctacattgtcatatgacagttcaaaattaaggaatagggatgtggaagtcatatttcaaaataaaaaaatgtatctggtcacctggatatacagattgatgagtgtggtcaactgccttcataactaatgtgtgtgattctgctttaggcataagtcaggaagcaagcaaatcctagtgacagaaataatgtgggtatatatagttgtggaggttaaaaaaacagattctttgaagaacaaatgcgcatgatcagggaacttaacatgacagcagcagtctcttagtgtgtggaaccagctcggacaaagagctgatttgggtgctaattcatagttatacaccatggtgtaacttaactgtattaggttaaaaggcattcttcaaagtgtctagttgagatagtaagcttttcataattaattttctaaataatgtattttcatgatgctatattcatgctgtgccagtttggatagtagattggaggtccctaagaccacctctgggttctgtgatttactaaaataactgagactatagttgtacttataacaatattacagtgacaagatacaaaacagaatctgtaaagggaaatggctcatgggcagttgtctagaggaaaccagaagcaagcttaccagagtcctctctgcatggtgttacataagactcaactcctctagcattgaattgtgatactacttgtgaaatgtctacaatggaagctcattagcaaccagcagcacaggttcttattgagattgattatgtaggtatgtgtctagtacatatcaagattcccaactctaagaagaagagcaagtgttccaaataagctgcattgtagagtttaggcgcagtgaccactcctacccattatggaaaggtggtaactctctcaaaccccatgttccttgactccagccaaaggccagtgttgcaaacagctctttttaaagttagcagtctgacttatgcctgctatgttaactttttgtgcatgtggtatcagaaaagtagggcctgcagtcttgtggggttttcttaaactatcaccagataatagttcatctctaagataattatttgtaaaagaaaattcatcagattacatttttaaatatttttataataaaaaataccataggtaggccttccatctaccctcgtgtgtgtctgggtcctcaaattggtcacaggatgatattaacagctgatttgtttttattgttcatatttatgtctcacagactgcatgagtatttgactcccaataaaactgaatattgaatacctagcttcatatgtagtacctgagcttttgtgtggccagtatttcttgccacttctcacgatggactgggtctcttttatgtatatgaccctggcaagttcactatgttaactttgaaattgggtacattattataattgggaattattgcagagtctcaatctctgtgtttgaaaaatgagggaagcttcccaagttattattctctgaccatatcagtaggatatccatttaaatgtttgagctaaatgccacaacatttgtgtgtgtgtgttttttttttttttttttttttttgatacactatgacaataacttcctggatagatttgttgttgtttttaatttttatagtaaaaatacactcattttacttgcaagaataatgtctagacattggaaacaattactttggtacagaaaagtctaaaaaagaaagtggaagataggaagtatgaatattttggtaaggatggttcagcatatctatgcatataggtaacaattgtatagaattttacaaaactaggaacacactaagcatacttgctcctaacaggattgtcctaatatgacactaatgttaaaggctgtataaataagttgacctccaacctcatttctaatgcctgctgtatcctggtgtactgaatattaatttttccttaaacagttttctgatgatgaggatctgtgtggtatcaattttaattacaacatgcctagactacagtccctagttatttaatcaaacagtaatacatatatatatatatatatatatggaaggcattttgtagatatttagcccataatcagttggctttgagtagggatattatgtgagataatgtcagtgggcctgatgaatcacttgaaattatttaaaagtagagctgaagcttctttgaaaaaagaaattgcaccttttagtagcatcttcctctcgtgggttagtgttccatctgagccatcctggggtatagccatatgttttttgcagttgcttagccagtcccacagtggcataagaaagttccttgcaataaatcatttgtatatgtcatattgattttgttactccgtttcaacgctgaccaaaagatattttgttccagaagtggttctagaggaagagaatcttaagaatgagttttctaaatcaattctgtgttttctcaaattggatttctcatcttttttagtttaaaggcactattgactttatttccagtggaaaatagggcattggttgttaaagccacgacatggtgataaatatatgccaaatatattggataatcccaagcatatacctatagaaggcatgattctagatgaccatgaatttgttagtttcggacataatagtcaaacgaaggactatagtggtatttactagttgctctgatttgtgcttcagaaagtgggaaagaaaaagatgaggacaaggcatcaaattccagctcaatcagaataacctgaaagcgtcagtcattatgcatggcttcttaaccttgtgttgttgatcttggcattcatagtaaataacttgacaggaaatctattacactgttactttatttgtataggcaggaggattctcttgcaagtaaacagaaatccaactggaattacctaacagaatcacatctcccaaatcaattctaagacaagtccagtttacaaatccacaattgcttcaataaacgggaggtcagttctgtattaggatggacgctggtacgttgcagagtgcttcacaaggccctacagccattaacccgtgtgactatgtactcaaaaggagaaatattcaaacatcttggcaacgactaactcctattatcaaatggcacgtttatattttgatgattgggcctggtgagaaggaagcaggaaggaatctaggcatatttgtaagatacatacataccagagggaagaaataaatcttataataattcatgggcctttcaccttggtgaaatttccacaagttcactgatgtaggcctattgagctatcccttctgggtgtagggcaagtagaatatagcccttcctacgatcaaaaaatagcgtcacaacgcctagtggaccactggggctattgtatgctacttattcctcattgaggcgtgctactttgcctattttgtgtgacctgaaaacattttgactcatccaagataagtctgtgcaatgtgtcccagctgctatgtaagtttctctgccatcaggaccctatgacccagaaaagccaaaagtgattaaaatgttaatgaaagatagtgatggttgagcctttggctggccctagttagtaaatcagcactttacaaggctgaggtgggagaatcgcttgagcccaggacttcaagacaagccttggcaacatagcaagaccttgttctaaaaaaaaaaattgaggcgaacagaccaaaaactcaacataaaaatgggtaatagatttgaacaatttacaaaaagaaaaataatattgacacaggaaatatgcaaaaatgttctatgttatttaaaaaacaagaaatataaattaaaactaaatttaaatacacttcttaccatttgattggcaaaactttaaaaatgttgtaataacacattttgttagctagtttcaaggcaagagtatatttatacattacttctgcaaatggaaatggtaccaaaaaattaaggcaacttgacaatatgcaacaaaatttctattaatatcttcacttttcaatcctgctttctgggatgtactcttctgatgtatcttcaacagggataatatacaaatgtacaagtgtatttataacagcatcatttgtaataataaaatattggaagtcactgaaatgtccataaattgcagcactgttatataaaccactcaatggaatttatgcagttttaaaaataaattactccatatgacatgatttccaagatgttattatgtgaatatagaagaattagaagtgtactatcctaacatttaagtaaaaaggaaaaataagaaacacatctattctgttaaaaaaaagtggtaatgaaaataataaaattagttacataaaggtgttaggtggcaacactgtggaattggtttaggggtaggaaggaggggagtggcacttctctgagaataatatgtggtagagcattgactcatgggaacatgttgatgactgacatacccaataatataaaatcaagaatgagatttctttgtagataaactaggaaagtgaaaatcatagaataacaaattaacctaaatgtatttcaaatcaataacataaacagtctaaaggtgacagcaagaagtaatttaagcaacttattaaacagtacagtgtttgactatatatcctcagtctaaagacaaaaagaactataaaaaatgttgaactctacttttgcattgttttttacaatgatatgaattagtaactctgacactgcatgatgcgtatgcaatggtcttaatgtttgtggcccaccaaaatccatatattgtaatttttaccctcaatgtgatggtaataggaggtggggcctttggagggtgattaggtcacgggatgaatacccttataaaaaatgccagaaggagcttgtttgtcacttcaaccaaatgaagacacagcaatatggtgctaactatgaacaagaaagtggccaactacctgacacaaaatctgccagtgctttgatcttggatcccagtttcca[138 bp omitted]cctcttctctaccaaaaatacaaaaaaattagccgggcatggtggcgagcacctgtagtcccagctactcgggaggctgagacagaagaatggcatgaacctgggaggcagagcttgcagtgagccgagatcgcgccactgcactctagcctgggcgacagagcaagactccgtctcaaaaataaaataaaataaaataaaataaaataaaataaaataaaataaaataaaataaaagccaggcaggctatgatattttgtgactaaaaaatattggtactgagaggtgggcttgctgctgcaacaaatacctaaaaatgtagcagtctttggaactatgtaatggatagagtctagaagagtttttacatgtatgctaggaaaagcctacattgccatgaatggactgataaggacaattctggttagcgctcagaaatagagaataagaactgtagagaaaacatcaatcttgttagagcatacctaggtagtcatgatcagaatgttggtagaaatatggacagtaaaggccattctgaagacctcagtcagaaatgttgaacatgttattggaagagaagagagcttcttgttataaagggacaaagaatttggctgaattatattcaggtgctagtgttttatggaaggtagaatttgtgaatgatataattgtttatctgaattaatttctaatcaaagtgttgaagttgcttgaatcatcttgactacccgtagtgaaaggcacgaagtgaggaatgactgaaataattattaattaaaagggaaacagaactaaaatttttaaaagtttacagcctatctactttggaaaaaaaaaaaaacaggaaacctgaagaatacaagggtatggttaagcaactaactaattcatgaatttagtatggattggccatgtcaactgaagccaggacctattgtccaagacaatggaagaatgaccccaaaggcatttcacagattatggcagcttctcctcccatcacaggcccagagtgcaaggacctgggggacagaaagggcctttgatgccagatataccctaatatattaggcacagtttcctgcctactacgattgagcgtgtcaataaatttttatctcttgggagggcagaacagagcaaggatacagctgtaactggtttagaaatagcagtcactcaattttcagagaagtgttcctcatactgtggttggcacagtcactttatctaaagaaaaccatgaaaagtattcttttttagtttagaaaaattgatatagaacatgagactccatttttttaaaataaaaatataggttgataggccagaattcacaggtccacctgcctgagccaaaattctcacgcctccacagagcaaatggactccatttcccaagataccagcgaaacgcctgcgggagtctaattgcccggtcgatgcgcaggaaatttggctcccgcaggcgtttcgcgagtagcttgggaggcgtgggaattttggcccaggcaggaggacctgtgaattctgggaagtggagtccatttgctctgtggagtcgtgggaactttggctcaggcaggcggattcgggggattctgggaagtgtagtccagacgcctgtggcatcatcgacacttccggtctccgagcaggacactgctacttaacaaggtggtttgagccaagtatgtgtcttgcgggtctttgcgaaagtgaaccagttattaggggcgcctaacgacctggggggtcaactaagggggtaagaagccctggagaagacctgaggtttggagatgcgaggggtgggagggaagtttcgttgccgtcgatggagccttctggcgttgggggctgtactcaggtccaccggaggagtcgtcgggggttcggggggggcggggaagaactctgtctagtcttgtgtgcctgtttagagggttttccaggtgtttgacctcgttcagtccgcctccctccactcttaagtgtgcgacctctttctcgcgatataacgtggggtgttacttaatctccctgtacctcccattgccgttttttaaatgaggatttcaggaccatcctgatagaattgttttaggagttgaaagttgtggtataaaacaaagacttaacagctcctgtcacttggtgtcctgttaatttcccgcgaagtggtcaggtgcccgggtggggtcagagctccagctgctccggcccttctcttggagcccggcagggctctggatgatcccggacgcctctgacctctttttaggaaggcgtgggttgcatccacgtttcacgaagggagaggagcatttaacttgtatccgggacggcgacgcagagtgtttgacagctttctccttccccagcctgacttttctaaaagagctgcagggagggacttggctactgaggacaaagctgtctacacgagtggtctttggcttttctctttttaaaaaaaagttatttattttgttagtctgtttttattattgttattatttgagaatgaggtttgctctgtctcccaggctggagtgcagcagtggcgcgatcttggctcactgcaacctccgcctcctgggttcaagcgattctctgtcct[134 bp omitted]cggcctcccaaagtgctggaattacaggtgtgagccaccgcgccgggccggttttttcttttacagagatgttcacctcaaccaagagtgtataggatgtgtccttgggcatgggtgttgataataattaaaccttaattggtaacttaattctaagggctttatggaaataaatacatttacgccacaccatggctctgtggaaaggtattgctctttttcttttttttttttttttttttttcctgagacggagtctcgctctgtcgcccaggctagagtgcagtggcgcgatctgggctcagtgcaataggccgcctcccaggttcaggcgattctcctgcttcagcctcctaagtagctgggattacaggtgcgcaccaccacgcccagctaatttttgtatttttagtaaagatggggtttcaccgttttggtcaggctggtctgaaactcctgacctcgtgatccgaccgccttggcctccgaaaatgctgggattacaggcgtgagccaccgcgcccggtcgctcttttccattttaaatatgggagtgagacacctggtgcttagttcccagtagaatgaggtacagctggagctggaacctaggcagtttgggtcagagcctgagttgatcatcccttggatacattttcattgaggtagaggaactagctggaatcaggtggggaaagagagttaggacttgattgaagggaccttgagagcaaggctcatagacttggacttctgtaggagtcttttaaaaatttgtcaacatcctgtttcactttttataaggattttgtattgtggaaccatatcattgtggagcattttaaaattagattaataggaggagaaaacatgttttaaattacccatgaatccaagatgtgaaggtgctaactgtctgatacaagagatggaacttccagttctcctccgtttctttttagtctttctctgtgtctattgtatatttatttataagcatttaaaaaaattgttataatatcttaatgtgttttcccatatttctttaactatggaaatttttaaatactgctaatagagaataaactagtaaactgccatattatgtcatgctcatccaatattattcccatttgtgtttttttttttttttttttagacggagtctcgctctgtcacctaggctggagtgcagtggtgcgatctcggctcactgtgagctccgcctcccgggttcacaccattctcctgccccagcctcctgagtagctgggactacaggtgccggccaccatgcccggctatttttttgtatatttagtagagacgaggtttcactgtgttagccaggatggtctcgatctcctgaccttgtgatccgcccacctcggcctcccaaagtgctgagattacaggtgtgagccacggcgcccagcccccattgttatcatccttatgactatttcctgatagttgaaaacctttcatttttatatcatttcaaagctgtagaagagttgcaaaaatagtataaggaattctcatatactctttacccaaatttgccgattgtttacatttttcctgtttgctttgttggtggccatcagccaaatactaccaggaacatatctgtaaccagagacgattgtagatttctgcagcaaggaagcccacattccatggtgatcatggggtgacttggtaagaggtgtttagaaagggcaggttatagggtctcacgtaacatgctagacaatattaagatatcatattaaatgatatttattaaatattagatatctgtttaaaaaactactaattgtgcttatagtgttataattagatagtgctagatagcatattccataacatcatgttatctcatatgtggttccataattaaatttgttcaattttttcatttatagtcctcacaactatcttctaccctaccctttaccctgaccccagtttaaagtctaattatatgcattgtgtttactcgtcacatttctgtcttctttaatctggaaggatttcacagcctttttctttaatatatgtggtatttttaaagagtgtaggcaagttattttggagaaagacgttcattgggatttatctgatatatctcatgtttaggttcagatcatgcattgttattgcttctgggccttatgcattgttggtgcggatactgccaaagtgataaggtttccttcctattgtaacataacagggccaaacgatgttggtttggcccttcattggtgatctcaacttcattcatttggccaagatgatgtctttcagatttgtccactatcaaattacctttttaaaagaaatagtcaagtttcttctggggagatacattattaatgggcattcactctaaaaatgaactgccagttctcccccatttatttattagtttcttcaactataaatattctatcagtatggactcagtcttgttaagttaaatgacatgtaaactaacaattatttttcccaattctattgaggtattttttacgtatcatagcattcaccaatttcaggtgtacaattcagtgatcttcaggaatttcacatagtggttttgccatcatcatgattcagtttagaccattttcatcccctaactggacttcttgtgcccacttacagttaaaactcattttcaggccgggcacagtggctcatgcctgtaatctcagcactttgggaggccaaggtgggaggtatagcttgagctcaggagtttgagaccagcttggacaacatagcaagaccccatctcttaaaaaataaaaactcattctcacctcaaatctggagcaaccactaacttatattctctctatataccattatctattctggatggttcatataaatgggatcgtataatccatgggttttgtgattggcttctttcatttagcatgatgtttccaagctttggaaacatcctttaaatttccaaataagattccatggtatggatacaccaccatttgcctatccatttacccagaggaaggcatcttggttgtgtgcagtttgggtttattatgaataatgctgctgtgatcattcatgggctaattcacaacacacatctctctttttctgcagactgtggcacgtttcaggcaggattcctccttcattcaaactgcatcacccaggagtctgcaaattccccaaagtaggaggaaaaatgaccacattcaaggtgaggggggcgtgcctctctcgctgttaaaattccatgtcactactcatattttcatgtgtttttctctgtcatgagaagactcaaggggaaaacaggcatttggggacctgtttgtgccaggtgcttcctttatctcttttgtgttgactgcatttggtttttggttttgctttgttttgttttgttaccattatttattttatggagtatgaaaattagtagaaatgaacagtgctcccacttccttacctcccctctctcaaattatctgtttttatcttctctgctgttcgtcatgtacatttgtaactgtatttgtattgatgatatacatctaattgtaaactgtgctctttttatatgttatataatcttccatttttatggttacatcatattcctattacattgatgtatctttttatttataactacctcacgctcatagacatattttaagcaacactgcagtgacagctttcctatacataaccttttcccacaaaattaattttgaaaaccatatgccattttagctcaattttgaaagggtacttttgatatgtaccacattggctgttttgcagatagaatattttaactaggcacagaacaaaaggatgtaactgctgcaccacacaaatattgttggagttttcacactggaagagctagattctgtgttctccttgtctcagtcatactttgcatgtgctttatttactggtctcttcttattcatttatgtagtaagcagtttaaccaaagcagtagaaagccttcatttaaaatgtccagtgatactaagttttgccaatcacttgtgttctgttactacatttactcctcagcgcagcggaatgaggttcctggtctcttcttcttcttgaacaggtgaaatatgagaaaccttctcaggtgtacacaggcaaccaaaggtcaggagtgttagccattcggctcaggtgaaaaagagaaacaaggagagagacagaattctccattgagcaacctgtgccctgtgatgtggatgtctggagtgccctgtggagtgatggtgtccctagtggtgctgctcctccctgtccctacttggtgtgacttcttgtcacatgtcactatgacatggcatctactccaggcactgaagtatactgattaccatagttgttatagaaaatctttaaatcccttttggcaaaagatgcctcacacaatgttaccagaagaaataatgacctggggcagaaatgttagccacgtggatacctaaagaaaataaaattcaaaatcaaaaccttgagcacagaataaaggaaaaactccaaacagataggaacaaaggacactaaaaggccaatgtaaaaggagaagtagagatggccaataaccttgaaaagtgatggttttcatttgtaatcaaataagtgagaataatagaatgatttgttccccaaatcagattaccaagactgtgggaatacttataacctgctcttggtcatgataaagagaagcaaagtacttgtattctgttcaaagattatggaggtaggtaaaaaactgggaagaaagcatgcagttatatgatcacagttctaaatgtgcttattttttgatgttttaattttcatttgaaattattattttaaacaatgagagagtaagatgttcttacatcttgctacatcattacttaatgatgctctttacaggattgataatggaaaatatgtaaaattaaatattctttactgtagctaaaagtaggtcatcagatctctggaatactatgcagccatgaaatagataatgctagtaacaacagtaaaaaagattccagctaatgttcattaaacagtggcacagatgtttccaaatgctatgtatttccttgtttaatcctttaaaatactgtgccaaataaggactattatttagagaggaaagtaaatcctgtaggcaaacatgtctaaggccacacagttaggaaggggcagacccttaggatgtacagtgatgcattctggcttctgatcaggacactgaaggctgcaattaacatttgtggtttgtaccttgagagtagaggacacactacataactgtcccactcagctgtccacactggtactgtggagtaggttcactgtgcactgattaccaacttgtgtgagtcctgtgagacagaacacgatctcactcaacagattacgtgaagcagatttgttatctacaaattggcagcaagggagcacaggagtgtaggatacactgtgaggtggccatccaaggctgaagaaaacgtcctggggtgggtagaatcttgaccccatttccaccagagcagaggtaccccagaaggcagcccacccgaggttatatacctccggggcaatacgacttactgggcactttctccctaactcaagacattatcttccctaggaaggacaggaacattgcattgctagcatgttctatgtttattcttcaaaactatacacaagaaagaatgattcaaggccaccctgaaaattacccacagttacctaaaacttgttagtttagcaaatactaaagaaaagcaatagcatccagggtttgagtacgagagaggaggacccaacaaagttgggactgaattgtttaatgttgctggggcagttggcaagatgtgtcgaacctatatatgggtagctcaggatgcagcatgtagagtcctagagggttacatacaagtagactcaatgagtgcacagaataaatgtatgagacttcatcattgcacttctggtggagttcaggaaaatcagtatgtgtcattgtcaggatatagacagaatgagtgggaaatctctaagttgacctacatccctcaatactgagaacaactttccactcatccccttcccctgctcaatgccgcttctcccccagtagtccttggtcataagattgaagttatgtcttcttgatgttgtaggaggcagtgaccttcaaggatgtggctgtggtcttcactgaggaggagctggggctgctggaccctgcccagaggaagctgtaccgagatgtgatgctggagaacttcaggaacctgctctcagtgggtgagcacgggcatcttttgtgtctgaacatcaggcctcaggagtggttttgtaccttagagtgttcaagtttgagtgtgcattgggaacctaaatagccagtaaattttgcctaaatattacccagaatgtgttgggattcagcacgtgaccttacctattcacagggcatcaaccgttccaccaagatacttgccacttcctaagggaagaaaagttttggatgatggggacagcaacccaaagagaagggaattcaggtaagaactaagcatctgtgtgtccttgtacctgactctcccacctgttgtgcttctgtccatgcccatttgcattgctctgatgtaaatgaccacatctccttcctggattattacaactgccttccagttggtggccctgttcccaccctaatatctgttctcatggcagccaaagcgatccttaggaaatggaagtcagattgtcattcctctcctcaaaagcttttataacttcttatttttattgatgttacaacctctttaagtgcatcttagagacctatgtggtctgctcttcatcccattctgcctctctgactacgtgtgtcctttccatctttctccatcatttccagccacatttcttccctgctgtttctgtcctgccaaggacactgtattgcctgttgtggtaaccaatgaccacaaacttagtggactaaacaaaaatatttattatctctctgttctttaggcctgaagtttgatacatttcactgggcaaaaatcaaagcgtccctagggctttgtttctgcctgaatgttcttggagggaaaacttcactttggtttaccagtgtctaggcactgtccacactccctggctcttgtttcacgtctccatcttcgaaggcagctactttgcatctctgaccattcttccataatcccattccctctgccactcttcctaagcctctgccttctacctttcaggtcccttgtgattgcattggtcactcctgcataaaccaggatgatcttcctaccttctgcttaggtgactagtgaccgttatggcgtctgccgttttaatcccccttgctgtgtaacataataggaaggctgactgtatattgcagaacagtttttttggcctgctgatggctgcttatccaattctgactttcttaggttccttgacatgattggtttcaggtgtgtacaattgacccacgtcccgtggaaacttctaagcattgtttttatgaccacactgagtaagatgccttccctgagacttatcctggagctttccatagggagcatatttatatctgggaagaaattctttttgaatgaggatttccagctacatttcctttgaaagatttacccatctgcagcccatttgccttttccaaagtctatatacacttcactggccccagcttcctccttcgtactagaagggggaagaatgaggatgaggggacacaagtcatgtagctgaacatttactctatttctggtcctctttcttcataaatgtgtctatttctgcatctttatgtcatacaagttttgttttcaaaaacattaaaggatatagattttacacaattttttcttgatttttatagatttagtgctgtattttgaactggtgaactttatgacctgttaggaattgggaaactgccctctaaaactagaaacatcctgaagattctcctttctccttaaagatttcttattaatttaatttatttttgagatgcagtttcgctcgtcacccagcctggagtgcaatggtgcaatctcggctcacagcgacctccgcctcccaggttcaagtgattctcctgcctcaccctcataagtagctggaattacaggtgcccaccaccacacccagctaatttttgtatttttagtaga[141 bp omitted]tattaaatatatctacgtaccactgtataccaataggtacacacttacctataaatcctttccaagattcaacctctgcaacttaactttccattggaagaatttacttaattcaggacttggtattatcctgacaaagttttgaatgttttgcaagcatgagccatagtaagaagcacatatttcaatataacccggacaaacatttttcatgcctgtagatgtgtatgagtgactctaggaggcatttcatggaatgaccactttcctgcttgtcatgatgctgtgataatttacattccagttcttttttgtaaatgtttattgcagagtttaactgtatttcatagctcactaatgtgtagtcttcaatataaaaagttataaagtcctatttatctgcatcataggctttcttttcatttcatgtgattcttcacatttttgattgtctgctcaggagcatccccctttgtggacccctggaaggacagcctttcagattcccctcaaaactgtagttgtgtgtctctgtactccttcagataaccaagttactctccacatcaatacagaaaagtaagatgaagtattttacatatgctgtgcaaaattcttgtgcagggatactttgaatgtgtacatagaaacactatgaagtgtttgatgtttaatgttgtgcagagttcaaccaactacaaaatttactgagacattttacagagaactgctctcacttcacaccaagtgcaaattcaggaggttttcaaaactgcctttgcattcaataattttctaaactctcagaactcactgaatacttttattctcactgactgatttttacagggaaaacatgtatattatacttagagaaaaaccaaataaaacagggtccagatgagaataaccaaatgcggaccttctattgtattctcctggcagagtaggatgtgttacattcccaggattaaggtatgacttagactcaaagtactgtcagtcacagaaactcacctaagtgctgggatccagagtaattattgggtctccattatggagccagtattgattgatgattcctaggtggttaatcagtctcctagtccactaactctctgtgacctaaagctccaccttaaatcacattgcttatttctgacatggagaggagcatctcccactcccaatcccccaaaggatttgccagttgcaaccataaattatattgtttcactatgcagagtgatccagtgattgccttcaagccaaccaagacactctcctgaggtatgacacttcaggatcctagagattacctctcagatgctgaggacaaagtcccaacctctttttggttaggttaactttttttttttttttgaggcagagtctcgctctatctcccaggttggagtgcagtggcacgatctcaatctcagctcactgcaacctctgccttccaggtttaagcaattctcctgcctcagcctcctgagtagctgggactacaggcatgtgccaccacacgtggctaatttttgtatttttagcagagacggggtttcaaggccaggctggtcttgaactcctgacctcaagtgatctgcccacttcagcctcccaaaatgctgggattacaggtgtgagccactgcatccagcacttttttttttttttttttttgagacagggtctcgctctgtcacccagggctcactgcaacttccacctcccaggctcaagcaattcttccacctcagcttcccaagtagctgggactacagagtgcacgaccacacctggctaatttatgtatttttagtagggacagggttttgctatattgcccaggctggtctcgaactgctggactccagtgatcaatcccaaagtgctgggattaaaggcttgagccaccgcacctggcctagtttaacttctttataaggatatacagcataaacacaaatatacaaagtgttgattaagttattgcttttccttaaagttccttttgattcatatttcattatgtacataaatttttattttcataatttatcatgcaagattttggactgactaggaaattcattacaaatagtaacaagttaaatgtatatcatatttttaaattaagtctattatttctatcaaggatttcacatgtgagacatgatgtggttctgaattggcctcatgcaaaccagaaatcagggtgtacttggaaaacaaactgaacattctctgtattcattaaagtttaatgtcatgtcctaagtgtgaaaccttgagatcactgaataaaggcttcacctgtacacatctcttaaatctgtgtctttataggaggcaagatccaaactgagttggagtctgttccagaagcaggagcacatgaagagtggtcctgccagcaaatctgggaacaaattgcaaaagacttaaccaggtctcaggactctatcataaataactctcagttctttgaaaatggtgatgtcccctcccaggttgaagcaggactacccacaattcatacaggacagaaaccttcccagggtgggaagtgtaaacagtccatcagtgatgttcccatctttgatcttcctcagcagttatactcagaagagaagtcttatacatgtgatgagtgtggaaaaagcatctgttacatctcagctcttcatgttcatcagagagtccacgtgggagagaaactctttatgtgtgatgtgtgtggcaaggaatttagtcaaagctcacatctgcaaactcatcagagagtccacactggagagaaaccattcaaatgtgagcaatgtgggaaaggtttcagtcgtagatcagcacttaatgttcatcgtaaattacacacaggagagaaaccttacatttgtgaggcatgtgggaaggccttcattcatgattcccagcttaaggaacataagagaatccatactggggagaaaccattcaaatgtgatatatgtggtaagaccttctattttaggtcaagacttaagagccattccatggttcacacaggagaaaaaccatttaggtgtgatacatgtgataagagctttcatcagagatcagcacttaataggcattgcatggtccacacaggagagaaaccgtacagatgtgagcagtgtggaaaaggctttattggtaggctagatttttataagcatcaggtggtccacacaggagaaaaaccatataattgtaaagaatgtgggaagagcttcagatggtcctcatgccttttgaaccatcagcgagtccacagtggagaaaaaagcttcaaatgtgaagaatgtggaaagggattttatacaaattcacaactgtcttcccatcagagatcccacagtggtgaaaagccatataaatgtgaggagtgtgggaagggctatgttactaagtttaatcttgacttgcaccagagggtccacacgggagagagaccttataattgtaaggaatgtgggaagaactttagccgggcctcaagtattttgaatcataagagactccactgccagaaaaaaccattcaaatgtgaggactgtggaaagaggcttgtacacaggacataccgtaaagaccagccgagagactatagtggggaaaacccatccaaatgtgaggattgtgggagacgctacaagaggcgcttgaatctggatatacttttatcattatttctaaatgacacataattgttcatatttatggggtacaacgtgctattttaatgtgtgcatacaatttatagtgatccaatcagtgtaattggtgtatctgttacctcaaacatttaccatttctttgtgttggaaaattcaaaatccatttgagaggagttggtagacagcaagggaagggtccctggagacccccagccaaacgggtcagtgtctcatccccacataacacaaaaagcagcctggggaagacaatcaagctacaggcactgataagggaactagcacaggggattgtgcctggagacatgcccatggctgcacagatagaagaacctccagcccattcaggtaaaaactcgcacaaacctccggctcactcagttaagggaacaagaccagacacagaaatgcctttgtcctttgtataatcagcaggctccgaggaaaaagtttcttcttttgtgggcatgaacacagtgggcttcagtaggttcaggttggcactttcttttgtggaaaaggaaaagcccagcctctgtaaatcatcacttcagctcctgattggtcccaggccaagctgaatagcccttaggaataatcacttcaactcctgattggtcccgggccaagctgaatagcccttatgaatcatcacttcggttcctgattggtcccgggccaaggtcccagaccaagctgaatcacgctttctccaagacagcccgcaggctaagtgcattccttccccttcccagtccataaaaaccccggaccccagcctcatactgggcaacttatttggatccccatctccactgtggagagcttttttctttcacttattaaacttttactccaatttcacccttgtgtctgtgcttcttaatcatattggacgtgagattaagaactccgggggataagagagactgttacagagagactgttacagtgtggtgcatttgtgagactacaacacatttttagcaatttgtaaataattgttgatgatagtcacctttagtgctgcagaacagtagaacttattcttcccctctacctcttttgtatctgttggccaacctttggccatctcacctacctcctacacttccttgcctgtctacatccactgttctactctctactacaaaatcaactttttttaacttccatatgagtgaggacagtcagtatttctctttctttgcttggcttatattaacaatgtccttgaaaactcatccatgttgccacaaatgataaaattttgtttccttgttatgtctaaagaggattccattgtgtatatatgccaccttttcttcattcatgtattgatagacacttaggtggattccttatcttgactattgtgagtagtgctacaatgaacctgggagtgcagatatctccgtgacatactaatttcctttcctttggatatacccagtaatagaattgctggatcacttgaattttattatgcttcagaagctccacacgggagagaaactacggaagtatgaggagggtggtatgtgcttcattcaggcctcaagtcttcaacttcagaatgtccacattggagagaagcctcagtaatgtgtgtaataaagtctttactcagttttcatgactacagtctcacctaagcattcacaaaggggagaaacattaaaatatgaggcacatagaaagcagttccttttgagtttgtatcttgtaatttatcacagaatccatgctgatgatacatttcatccagtcctgtaggagaaaaaacatttaagttaaagcctgtttcagccatagctcagcataccccagtggtcctgggactgtcacagtggagaacccttgtaagttgtgcagtagggcttcaaacaaaagtttgacagttacagttattcaggagacagaccttaagagttcattcatgcatttacaaaacgaatcatgaacatatcaaagttgattaccactagaatgtcagtgacatgtgttttctgctgcatcttcacaactttaacactgattatcactttgtgttcactatgtgttaaatgaattaaaaggagcaaacgcgatgtttttaaattgtatctaagagaggaaatctacaaataattcagggacacctgagttgaaatgcagagtacactaaatactgcagttcacagcattattttgataatatctgttcacacttggttcctgtcttcccctcctcctctattccgaagttgcattcttagtatttgtggctttgtgtagtgttccattggttgaatacaatataaattcaacaataatttgtaatttttctcacactacaggctgaaaacgttgtaataaattcaataaaacatcttaataaattcaaaagtttaataccataaaagtcttttccaattataatctagatcacaaaagctgaaattcaatcacatcatgaaaagtggaaaattcacaagtatgtggaaactaaacacactctttatatatatatgtgtatatatatgtatgtatatatatgtatatgtatgtgtatatatatgtatgtatatatatgtatatatgtatgtgtgtgtgtatatatatatatatatatatatatatatatatatatatatacccaccctgtgtccaagtgttctcattgttcaattcccacctatgagtgagaacatgcggtgtttggttttctgtccttgtgatagtttgctcagaatgatggtttccagcttcatccatgtccatacaaaggacatgaacccatcttttttaatggctgcatagtattccatggtgtatatgtgccacattttcttaatccagtctatcattggtggacatttgggttggttccaagtctttgctattgtgaatagtgccacaataaacatacgtgtgcatgcagcacactcttaaataatatgtcagagtacatcaggagtgaaattaggaaataccttagacaactgaaaatgaaaacaatggccaaaacttttggaatgaggcaaaagcagtaggaggagggaaatttatatctgtaaatgcttatattaaagaagaaagatctgacatccacagcctaattttattttcatgaactagaaaaggagaatcttacagaaagtgattaggagggaaataataaagattaaagtattaataaataaaatacagaagaagaatacaaagaaaatcaaccaaaccaagagttgattattctgaaagactaacaaaattgtgaaaactttagcaggactgactaaaaaagactcaagtaactaaaagtggggacattattacccatttttacagaggtgagccacagcgcccagcttcatttttgtataaggtgtaaggaaggggaccagtttcaatcttctgcatatggctagccagttatcccagcagcacttattgaatagggagtcctttccctgttgtttttgtcagtgtcatcaatggcatggtttggatgtgtccccacccaaatctcagcttgaattgtatctcccagaattcccacatgtgggagggacaccacagaaagtcagaattattaattaaaagggaaacagaactaagaattttaaaaattcacagcctatctactttggaaaaaaaaattagaaaacctgttctggataaaacaacggtagagataagcaactgatttaggagattagtttggattggtcatgtcaacagaagccaggacctgctgtccattaacactggaagaatgaccccaaaggcatctaggagatcatagaggctgctcctcccaacacagacccagagtgcacggacctgggaagcagaagggacctttgatgccaagtgcccctaaccttttaggctcagttccctgcatgctacgattgagtgtgtcaatacatcttatctttcgggaaggcagagtagatcaaggatacagctataactggcatatgaatagtgatcactcaattttcagagagcggatgtttggcatcaaaagtttggcacagtcaccttatttttgtgtctaaacaaaattttgaaaagtttttagtttagaaaaataggtaaacagtagactccattttttttaaaaagaagaatattggtttataggccaatgtatgtttatagggagaaaaaaagttaccttcaaaagagcaggtttttagatgaattgtttcctaatttagctttatactgttattattttttaaccaatgccagtttttaaattgctaactataataaagaaattatgtttcaccaagaaataagaagaaacttaaaaaaaaaaatctttaattattgaggtatctgttgcctaggctggagggcagtggtggcatcatagctcactgcagcctcaatcaaactcctgggcttcagcaatcctcccacctcagcctcctgagtacttggaacttgtagtcccaagatcaggccaccatgcctggccagttaaaaaaaaatttttatagagacgaagtctccctgtatttccctgtctggtctccaattcctgagctcaagggaacgtcctgccctggcctcccaaagggttggcattacaggtttgagccactgcgcttggccaggaagaaaactctttataagacatgctccttcacctatagaatcctcccgttttactgcatttacaatctcaatgtaagattgataccaatgcctagctcttcatcagtcattattgctctgaggtactgagcaattcactacattcgctgaaatttgatgtttctacatctaaggagaaatatgaataccatgaaaagtttatgggaagatagctattccatgacgacaccgcttctccactagtagctgtgatcttaaatgggggtggcttttcctgccaaaccagtggtcccacagcttctggagtaggggctggtgtcttcctgctcctcattgcccctgccaaaccattccacctggctcatcctttaaaccgttagttttaacctcccatcgtcagattatcctaatccttgaagattttatctcctcgtttgttctcttcccaataacactcctgtcatcgtgggaggcgtttagacttcaggaattcctgtctatacactattttcgctcaaagactcaggaagagagacggacgactcacagggtcacagtccacattccccaccaggcgctcagagatatggaatacgttcccggtgggcactgcggtgtgtgtagtcaaggaccaccgcggagtccaacgcttcccgctgaagagtgagattatagacattttcctttggcattggaggaagcggagtccagacacactctgagtcgcgggcaagttggctcaggcgggtggacgagtgaattctgggaactgtagtccatcaacttcatggaatggcggaccctttggctcaagcagttgaaccggggaattctgggaagtggagtccagacgctctgtggagacgcgagcacttccggtgtgtgagcctgcggttgctacataaccgcgtagtttgagccatttctgcgtctggcgggtccttctgaacttgtcaccttcgcttggggtcgcaacgacccgatgatcgatgatccaagcaagggaaaagaagccttggcggagagcggaggtttggtgggggcggggaatggggtttttttcccgtccacggaagctttctgggatgggggtgctgtgctcgcatcccgggggttggaattggcggggtcctctgtgccctgctgtgagcgtttccaggactttgacctcgctcagcctgcctctctccaccctacctgtgcgaccgctttctcgcagtgtgacgtggagtgttactcaatgtccttatactttccattgctgtttttggtaatggggacattagaaccatcctagtagaatcgtttttgggaactgaaagagataacgcaaatgagaaccttaaagcagtccctgtcacttggtgactggtggtctcttgttaacttcccgaagaggtcaggtccccgggtggagtcatagcttcagctgcaggggccctggtccttctccctaatccctgcaggacgctggatgatcccgggaggccttctgacctctttttaggaaagcgagttgcgtccgcttccacgaagggcggggagcatttaacttttatgggggaccgcgatgcagtcagggtatttcacaactttcgccttccccagcctgacctttctaaaagagctgcagggaggggacttcttggctactgagggcaaatctctatgtgattggtccttggcttttttcctttatagagatgttcacccaaccgagagtgtgtcctcgggaatgggtgttgataatcattaagccgtaattggtaacttcattctaagtgctttatacaaataaatttaggccacactgtggctctgtgaagtattgcttttctttgttttaaaaatgagagtgagacacagggtgcatagcagccaactagtgagaggtagagctggggttggcacctaggcagtccaggtcagagcctgagttgatcacctcttggatacattctcattgaggcagaggaactagctggactcgtagggaaagcaagttaggacctgattgaaaggacgttgagagcaaggctcgtgggcttggacgtctaggaatttttaaaaatttctcaactattttgtttcatgttttccaagtatttcgtactgttgtggaactgtatcattgtggaaaagtctgaaataggagaaatgagagtagaaaaagttttttaattacccatgtatccaagatgtaaaggtagtaactgttaagcttctaattgatttcttttgtctttctttgtgtctacttctatatttgttgataaacatttttttaaaaattgttatattttaatgtgttttcccatatgtcttttaactatagaaaattttaaatattgctaatagagactaaactagtgaggctggttgtggtggctcatgcctataatcccagcactttgggaggccaaggcaggtggatcacttgaggtcagtagtttgagaccagcctggccaacatggtgaaaccccatctctaccaaaaatacaaatattagccgggcgtgatggcacgtgcctgtagtcccagctactctagaggctgaggcaggagaattgcttaaacccgggaggtggaggttgcagtgagccaagatcacgccactgcactccagcctgggcaacagagtgagactcaaaaaaaaaaaaaaaaaaaagaataaactagtgaactgccatattatataatgctcaattttattatt[184 bp omitted]ctgggcatggtggcaggcagttgtggtcccagctactccagaggctgaggcaggagaaaggcgtgagcccgggaggcggagcttgcagtgagcgagatcgcgccactgcactccagcctgggctagggagcgagactctgtctcaaaaaaaaaaaaattaaaaactaaaaacaaaataaaatattttcatctttatatcatttaaaagctatagaaaagttgcaaaaatagtataaggagttctcatactctatccaaatttgccaattgtttacatttttcctggttgctttgttgatgaccatcagccaaataccaccaggaacataactaaccagagacagctgattatggctttctgcagcaaggaagcccacataccatggtaaatgtggggtgtgttggtaagaggtatttaagaagggatggtatagggtttcacataacatgctagataatattagatattaaataatattgttatctattacatatcagatctgttaaaagactactagtagttgtagtgttactcattagatagtgttgaatagcatattacctaacatcctgttatctaatctgtagttacatatttaaatttgttcagtttttcatttaaagtcctatgccaggcacagtggctcatgcctgtaatcccagcattttgggaggcaacggcgggtggatctcctgaggtcaggagttcgagaccagcctggccaacatggtgacaccttgtctctactaaaaatatttttaaaagccgggtgtggtggcatgctcctgtaatccctgctacttgggaggctaaggcaagagaatcacctgaacccagcaggcggaggttgcagtgagctgagatcgcgccactgcactccagcatgggtgacagagcgagactctgtctcaaaaaataaaaaaataaagtccttatgactgtgtcccctaccccacccttcacctgcaatgccattcaaagtccagtttatgcattgtctttagttgtcacattccacagtttctttagtctagaaagattccacagtctttgtcttttataaacatggtggttttttttttaataggaaagttattttggagaaagatgttcatttggagtttgatatatttcatgtttagtttcagattatgtattgttggtaaggatattgcacaagtgatgaggtttcctctttattgcaacataacagggttcacatgatgtggtttgtcccttcactggtgatctcaactgtgttcacttggccaagatgatgcctttcagatttgtccgctgtaaagttaccttttttaaaaaaactcaagtttcttattggaaggtacattattagtgggcattctactaaagatgaacttctagttctcttcatttattcatttgtttgttcaagtataaatctcccaacaatatggactcagaattcagtcttatgaaggtaaatgacatgtggattagcaattttttttcaactctattgaggtatattttacataaagcattcactcatttcaggagtacagtgatctttaggaactttgtaaagtggagtaaccatcatcataattcagtttagttatttttcaccctcagttggactctgtgcccatttacaattaaacctcattctcaccccaaatctggagcaaccactaacctacttttcctctatgtatacatttgcctattcggacatttcatataaatggaatcatctaatccatggattttggtgactggcttctttctcttatgatgtttccaaggtttgtgcatgttgtagcatgggttggtacttcattccttttaatttccaaattagattccattatatggatatgccatgatttttctatccatttacccagaggaaggcattttggttgtgcacagttttggggttagtatgaataatgctgctgtgatcattcataatacatgtgcttgttgctacacagcctccccagccaccatttcatgtctctcttttgctgtctctggcattttccaggcacaattccaccttcctttgtgctccattactcaagacactgaagactccaaaaagtagtaggaaaaatgaccacattcaaggtgagtagagctcacctctcttgctattaaaattccatcttattgctcatattgtcatatatttttctctgtcttgggaagactcaaggaggaaatgggcatttgggacctgttgtgtgccagttgcttcctttgtctcttttgtgttgactttgcatttggtttttggtttgggttttgttttgttttttactgttacattatggagtagaaaaattagtaggaatgaacagtgctcccacttcttcacctccttgctctcaaattagcctgatttttcttcttgtgctgttccttgtacattcataactgtatttgtattgatgatggagttccttatgtcaagagtgctctatacaccaagataacatgtccttctggttttcttcatacttgtccatcagatagttagtccccctttctgtggaggcccacattgcgcatgttggctccatttctcttagatgctccagggaccctctgacccacttcacccacctcctgagtcctctggccccaggaatgagctattatttaaggtgtcgcaatcagcggatcacacaccaagctcctgtgtttccgtattctgtccttctgtctcaatccatgcagccagctcacatctgtggaggggtggcctgtgtcccgcttatcattctgtcttctttataaatcatcaagctgctgtccagcctgcgcccccaggctgccatcacagcactgggccaattgcccaggatataagtgctccccctttgccagtccagagttctgtcaaattggaccctgctggctgcaccaattccatggaacaggttcactagttacagacttggcgagtctaccatgagagagcacactcatgtatgacaaattacataaagcagatttattacatgtaggtagcaagggacaacagaagcctatgatccactgtgagccagtcctccaaggcttaagaaagctgcctagagtgggtggagtcacgactgcacttgccccatttgcaccatagctgaggcaccccaagaggcagcctgtcccaggctatatgcctcaggggtaacatgacttactgagcagttcctctctaactcaagatattatcttttatggattggactagaaccaaagaaggcataaaaaaaaataaaaagatgttatcttccctgggaaggacactgcataactagcacatttatggttattcttgagacctataaacaagaaagtggggagaatggatccaaggctactttgaaaatagttacctaaaacctgttagtttggcaaatactaaagaaaagtgatagcatccagggtttgggtctgagagaggaggacaataagcctcatcaaacaaggttgagactgaattgctcattgttgctggggcaactggggcaattggcaaaattcattgaaacctatataggtgtagcccaggatgcaccatttgaaatcctaaggggttacttacaaggagactcagtaagtgcacaaagtaaaaatacaggaggtctttttcatgattgcacttctggtggagctcaggaaaatcactgtcaggatacagacagaatgagtgggaaatctataagttgacctccacttctcctctccgcctgctcaatgctgctcctcccccagtagtccatggtcataggattgaggttatgtatccttgatgttataggaggcagtgaccttcaaggatgtggctgtgttcttcactgaggaggaactggggctactggaccctgcccagaggaagctgtaccaagacgtgatgcttgagaacttcacgaacctgctgtcagtgggtgagcacaggcaccctctgtaatggtacatcaggcctcaggagtggctttgtatcctagagtattcaagtttgtgtatgcagtgggaacttaaatttccagtaaattttaccttgatattacctagaatgaattggtattaagcacatgactttgcatgttcacagggcatcaaccattccaccctttccacttcctaagggaagaaaagttttggatgatggagacagcaacccaaagagaaggaaattcaggtaagaagcaagcaactgtgtgtccttgtacatgactttctttcccatttgttttacttctgaccatgcccacttatatcaccctgatctaaattgcccaatctctttcctggtttattacaacccctttctggctggtggtcctgttccctcccttccaccctgacatctattttcccccgagcagccaaaatgatccttgggaaatgcaagtcagttttccactccttggtccaaaagcctttatggtttattaatgttattaaagttacaacctctttattggcttttagagaccctgaggtttgttcttcatcccctgctgcctcttgactacatctgtcctctcgcccttgcatcatcttttccagccacgttgtcctccctgctgttactctgtcctgtcatggacactgtattccctgttgctggtaacaaataacagacttcacagattaaacaacacttttgttctttctgacatggggaggacggtctcccacccctcaccctcgaaaggagtggccagccacaaccctaaatcatattgtttcactatccagagtgatccagagttggcaccctaacaaacaaagacactgtcctcccgcatgatatgtcaggatcctagagattacctctcagatgctgaggacaaagttctgacttctttttacttagggtaacttctatataaggatatacaacataaacacagatatataaactattgattttgttattgtttttccttaaatttccttttgatttatatttcactatgaacataatgttttaatttagtaatttatcatgcaagatttttgactgaccagaaaattccttagaaatagtaacaaattaaatgtatatattatatcagttttttaatggagtctgttatttccatcaaggattttacatatgagacatggtgtggttataaattggtcacatacaaaccagaaaacaagattcatggggaaaacataaactgaacattcattaaagttgaatgccatatcctaagtgtgaaatcttaaaaacaccaaacaaaggcttcatttgtccacatctcttcattctgtgtccttataggcggcaagactattgcggaagcaggaccacatgaagactgcccttgccagcaaatctgggaacaaactgcaagtgacttaacccagtctcaagactccatcataaataattctcacttctttgaacaaggtgatgtcccctcccaggttgaggcaggactatctataattcatacaggacagaaaccttcacagaatgggaagtgtaaacagtccttcagtgatgttgccatctttgatcctcctcagcagttccactcaggagagaagtctcatacatgcaatgagtgtggaaaaagcttctgttacatctcagctcttcgtattcaccagagagttcacttgagagagaaactctctaagtgtgacatgcgtggtaaggaattcagtcagagctcatgtctgcaaactcgtgagagagtccacactggagagaaaccattcaaatgtgagcaatgtgggaaaggcttcagatgtagagcgatacttcaagttcactgcaaattacacacaggagagaaaccttatatttgtgagaaatgtgggagggccttcattcacgatttccagcttcagaaacatcagataattcatactggggagaagccgttcaaatgtgaaatatgtggtaagagcttctgccttaggtcaagtcttaataggcattgcatggtccacacagcagagaaactgtacaaatctgaggagtgtggaaaaggcttcactgatagcctagatttgcataagcatcagataattcacacaggacagaaaccgtacaattgtaaagaatgtgggaagagcttcagatggtcctcatatcttttgatccatcagcgaatccacagtggagaaaaaccatacagatgtgaggagtgtgggaagggctacattagtaagtcaggtcttaacttgcaccagagggtccatactggagagagaccttataattgtaaggaatgtgggaagagctttagccgggcttcaagtattttgaatcataagaaactccactgccggaaaaaacccttcaaatgtgaggattgtggaaagaggcttgtacaccggtctttctgtaaagaccaacaaggagaccacaatggagaaaactcatccaaatgtgaggactgtgggaagcgctacaagaggcgcttgaatctggatataattttatcattatttttaaatgatatgtaagttgtacatatatatgggatatggtatgaaattttaatatgtgtatataatacgtaatgatcaaattgatgtaattagtgtattaccttaaacaattaacatttctttgttttgggaaaattcaaaatccattgttctagcgatttgaaaagaaacaataaattattgttgattatagtcacctttggtgctttagaacactagaatgtatttctcctatctagcagtacttatgtatcttgttacccaatctttggctatctcacctaacccctacacttccctgcttctagaaccactgttttactcactaattctatgaaatcaacttttttagcttccatatgtgtgtgaggacagttagtatttatcttaccttgcttagcttatattgtttaacatgtcctccaaagctcatctatgttgccacaaatgacacaattttgttttctttttatgcccaaagagtattctattgtgtatatatgccaccttttcttcatttatctattgatggacacataggtgggttccatatcttaactattgtgaagaatagtgctccaatgaacatggtagtgtagatatctgatccacatactgatttcctttgctttggatatactcaatagtgggattgctagatcactcgaatcttatgcctcagaggcttgacacaagagcaaaactatggaagtgtggctagggtgatatggcttcataccacctcaggcctcaagtcctcaactgcaccagagtgtccacgttggacagaatccttagtaatgaggtgtgtgataaagtctctgctcagttgtctataatctcatttgagagttcacaaaggggcaaaacattaaaaagaggcatatggtaagcacttcagtgtgtgtttatatcataatttatcacagtccatactgataatatatttcatccaggcttgtaggacagaaaacatttgtttaagttaaattcagtgtttcaccatagctcagcattctcccatcatcctaggaccatcgtagtagagaactcttgtaaattgtgcagtagggttgcaaacagaacttacgcttgtcattcaggagacaggccttagaataagagtttgttcacacatttacaaaaccctaatgatgaacatgtcaaaagtggtgaccactagaatgtcaactacaggtaccttgttttctgcatcctcaggaccttaacactgattagcacttacatgtttagtatgtgttaaatgactcaaaaggagaaaatatgatattttaaaattgcatctaggagagaaaatctacaaaaaataattcagggacacgagttaaaatgcagaatacactcagttctgcaatccaaagcattattttgggtaatcttaccctgttgcacttggctgctggcttcccctcatcctctgttctgaagtttactactagtggctttgtctaatgctccattggttgcatacaatataaattcaacaatcatttgtaactcttctcacactacaggctgaaaatggtttgttaacttgtcaataacagtccactgcatatatcacaattacatttttttcaacagtgttaaggcaaaatttatagtaatactttttacgtggcagatgtagttacgttggaaaaaacttccttagttctgaattctcatgattgcttctgtatttccatgcaggccttgatataatggccttctaattgtggtagcatttattttatcaaacaactcaggtagaagctatgccaatttgacaatttttggaaacctaacctaatattctcttcctatctctatgaaataccaagagaaacctatcggagtttggtaatttcatgaaatgtatccatgattggggtaggagtgacatttacatgctcttctttattgttggcagtaaaaataagtcttttgtaagcagtgtatatcagaatgtataaggtacaagtgttttacctggaaatgatgggataggaaattatgattatgatgttaaaactgtgaaaagtagaaaaccacatggatgatatcaccccattttaaaatggaataagtattcaacaagaatttgtgtgaaatgcatttattcctataacataagaccaataaaatgagggaaccagacatacagtaaaaggagaaaaacataatgtgagctttgtgaaatctgactgtaaccttcataacataatcaaatatctttgtgtgtttctgggactttttaatgtgtatatacgtaatttgtgaacaactattctttcctctggcaatgaatatttgctggtatttttccattttataattttatgcattttttctcagtgaacatcagttttatcaaagcagtaaatttagtgcaataaatttgcaaacttattaacgttaatcacttacctaccaggactcagaatctcagaataaaattgctctatattgtcatatgatgtaagttcacaatgactaggg[136 bp omitted]cggtgaaaccccatctctactaaaaacacaaaaaattatccaggtggtggcgggcgcctgtagtcccagctactcgggaggctgaggcaggagaatggtgtgaacccaggaggcagagcttgcagtgagctgagatcatgccactgcactccagcctgagcaacagagtgagactctgtctcaaaaatatatatatattctctggtttttagaatatgcagataaagtgatgaagtctggttaactgtcttggtaattaaagcatgtgatgcttctttagggataagtcagggagtgtgcaaatactggagatcctgcccagtgcccagacacagctgatttatcgagacagagaattcacaatagcgaaagaatttaatacacatagaactggctaaatgggagacaagggttttattattactcaaatcagcctccttgaaaatttggaggctagggtttttcatagatagtttgacaggcagggggctagggaatgggtgctgctggttggctggggatgtgaaaaatggtccttgtgcattaagtccacttctgggtgggggccacaggaccagttgagtcaagagtcatgggtttaggtggggccatctggttgtcagaaatgcagaagcctgaaaagacatctcaaaaggccagtcttaggttctacaatagtggtgttatttactggagtaactggggaatttgcaaattttaagacctctggaataacagctggaaatcagaataatgactggtaatcctttacacatatatcttagaattcaggcccctctcatcctcgtaaactagtggggcctttcaatagtattacaaaggcagtttagtttgggggaagggctattaccatttaaattataaactaaattcctccccaagttagctgggcccacgcccaggaattactaccaagggcagtttggtggttaaaagcaagatggagttggttagatgagatctcttgcactgtcataatgttctcactgttataatttttacaaaggtgatttcagagattgaaatagatatacatatgtgtgaaggttgtttgttttttgtcttttaaagcaacagatcttcacctgaggtcaggagttcgaaaccagcctggccaacacggtgaaaccctgtctctactaaaaatacaaaaataaccgagtgtggtggcacatgcctgtaatcgcagctactcaagaggctgaggtgggagaatcacttgaaactaggaggcagaggttgcagtgagccagatcacgtcattgcactccagcctgggtaacgagcaaaactccatctcaaaaaattaaaaaaaaacaaacagatcctttgaaaaccagaggtgtatgggcagggaacatagtatgacagcagcagagcttctgttgctatggatccagttagaacaaagacctggtttggatgccaattcagagttatataccatggtgttgacaaaaagagtcaaactctataaaatataaagaggtttattctgagccaaatatgagtaaccaaggcccatgacaaggccataaaaggtcctgagaacatgtgcccaaagtggttgggttatagcttggttttatacattttagggggacagaagttacaggcagatatcagtcaatacaggtatacattgatttggtctggaaaggcgggacaactcaaagttggccatggaggtgcttccaggtcttgggtgggttcaaagattttctcattggcagttggttcaaagagttatctaaaggcctggaatcaatagaaaggagtgtctggattatgagaaagggttgtggagaccaaggtttttattatgcaaatgaagactccatggtaaatggtaaatgtctcttatcagttgaaaacagtgccagactcttcagttaattctctcctagagagagacctgggaaaggaagaggaatgtagattttacaaaatgaatatactaagcatgctagattctaatgagattgctctgatttgacaatattaaaggttttcttaataaattgacttccaatcttatctttaatgtctgtagtactcttgtgcactgaatattatttttttcattaaacacttttctgtagatcctgaggaaaagatacaaaaaaaatttgaaaaactcaaaaggcagtttcctgctgatgaacatctgtgggataattgattttaatggatttatagtgcatagactatagtccctatttaatcaagcactaatatagacattgtgatggtattttgtagacattcagcccataatcagttggctttgagtagggatattatgctaaataagggtaggcctgatcaatcacatgaagatccttcagaatagagctgaagcttctctgaatgaaaaaaatattgcatcttctggtggcatcttcctctcatgggttagagtcccatcttcacctttctggtggccagccatatgcattttggaattgcttagtgatatggtttggctctgtgtccccacccaaatctcatgttgaattgtgatcctgagtgttggaggtggggcctggtgggaggtgattggattatgggggctgtttctaatgatttagcatctatccccctagtgctgtctttttatggaattctgatgagatctgcttgttttaaaagtgtgtagcacctcctcctgctctcattctctcctgctctgccatggtaagacatgcttgcttccctttcactttccatcatgattgtaaatttcctaaggcctcctagccacgcttcctgtacggcctgtagaactgtgagtcgattaaacctcttttcttcataaattacccagtctcaggtagttcttttttttttttttttttttgagatgcagtcttgctttgtcacccaggctggagtgcagtggcacgatctcggctcactgcaacttctgcctcccaggttcgagctattctcctgcctcagcctcccgagtagttgggattacagatgtgtgccaccatgcccagactaatttttgtattcttagtagaaacggggtttctactatgttggacaggttggtctcgaactcctgacctcaggcgatccacctgccttggcctcccaaagtactgggattacaggtgtgagctcactgcacccagccaggtagctctttatagcagtgtgagaacagactaatagacttagccagttccaccgtgccaaagtagagttccttgcaataattgcttgtatatgtcatactgattctgtttctctggttgaatgctgaccaaaagacattttgccccacaagaacttctagaggaagagcaccctaaggatgagttttctaaattgattgtgttttctagaattggatttctactcttactaaatttaagagcactattgactttatttccagtgcaacatagggaactggttgtgaaaggcatggtgtgataatatgccaaatatcatactgaataatcctaatcaaatgcctattggaatgattctggtgaccatgaatttgttagtttaggacacagtagacaaacttatcagtatagtagtattttctggatgctcctagttgggcttcagaaattaggaaagaaggctgggc[137 bp omitted]ggtggcacgcacctgtagtcccagctacttgggtggctgaggtaggagaatggcatgagcccgggaggcagagcttgctgtgagccgagattacgccactgcactccagcctgggtgacagagcgagactccatctcaaaaaaaaaaaaaaaaaaaaaaaaagaaggaaagaaaaagatgaggtcaatcactatgcagggcttaactatgccttgttgatcttggtattcacagtaaataaattgatgggaaatctatgatactgtcactgggtttgtgttgtcagaagagttctattgcaggggaagagaactctaactgcaaccacctaacacagtcacagccctcaaatcaattccaagacatgtccagtttacaaatccacattcatttacataaaggggaggccaatgttagatgagtatgggccctgatacatttcagagttctccataggaaaccatgggcataaacctgtgactgagtacataaaaggagaaataatcactcttttgggcaatgactgaatccttattgtcaaatggcacattgatatgatgatcagacatggtgaggagaaagtaggaactacactaggcatattagtaagacacatacatgacagaaaggaagaataaatcctataaatattcatgggccttccactttggtgaaatttccataggttcactgatgtgggactattgagatatcccttctaagatataggacaagtagcatatggtacttcctacaaccaaacaaagtgtcacaatgtctagtggccctccttggctgctggatgctacttatgcctcgctgggatatgctactctgcctttttttgtctgacccaaaaacattttgcctcaactaagataccataaggctgtgtaatgtatcctggctgccatgtaagtttctctacccctaagacactgtggaccaggagatccaaaagtaattgaaatatcagtgacagagagtgatgtttggagccactggctggtcacatttgatgaatcaaaccacagatggataggattttgtagcaaagcccagtcatcctctacatatacttactctttctctttttggtagagacagggccttgctttgttgcccaggctggtcttgaactcctggcatcaagagattctcattcttcagcctcacaaagcaatgagtacaggtatgagcccccacccccagcctacttactcttctttggaaaagcagcctatgattttgctagtggtcttagcagagacagagcacttaaccatgacctaccaaattagcatgcgtgccaagctttccatcatgaattgggtgttgttggcccttccttgtctttaaattgtatgtgcacatcggtattccatttgtaagtggtatatgtatgattgggtttgagcaggctctgaagccacagataagtgtatctaaggcccatgacccctactcctactatgttatcttcagaatgagtgaacatgaagacaagtcctatgaattattgtgtcacagcagcaaaaagaaatgaagtgattaaaagtaaacaaagcctaaaggaccacatgtgcattataggtgtcctgggtagagagaaagaaagccaagagagattacttatagaaataaaagctgaaaacttctcaaatatgaaaaacacatcattctgtaaatccaagaagctcaatgcatttcaagtaagataaacccaaaggtacccaactgagacatgttatttaaaaattgttggaaaccaaagacaagcgaaaaatttgacagcagcaagtccaaagtgacttgtcatgtacaaagaaatctttaatgaagatgtcagcagatttctcagcaaacatctgagactagctgatatattctttgctaaaaacacatacacaccatacatacacacacacgtctattgagaattcaacattcagccaaactgtccttcaaacttgagagataaatctatgtgaatgggtagacaatatgtatagacataatatatgacatcagttgtacaaagtggggagaaggagaagctgtgaatgagtagtgtttttgcacgtgattgaagttaagctggtatccatggaaaacagtttgctacaactttagaatgttacatgtagaatgttacatgtaagtccatgaatcagaaatgttacatgtttctaactacagatactaatgaaacatacacaaagggaaatgagaagagattcaaaatgtatcactacagagaaagaaatcaacatcaaggaaggcagtaatggaggatatgaggcaaaagagccagaagacatatagaaacaaataaaatggtaagaccttccctatgaataattgatttaccataaatgaattaaacaccctaaccaaaagatgtagtttggtaaaatgattgaaaaaaacagtatccaagtgtatgctctgcacaagggatttgctttagatctaataacatgcatagacttaaagtgaaatgatgggaaagtttttccatatcaatagtaacaaaaagacagaaagagtggcagaaaagagtggcagagacaaagaaaaactatataatgctaaagggtgattccaccaagaagatatagcagttataaacatatgtgcaccacacatcagagctccaaattacatgaagcaaatacagaattaaagagagaaataggcagctccccagtaatacagttgacccttgaaccacatggatttgaacttcacaggtccaattatatgtggatttttttttagtgaaacacacattgaaaatacaatattcataggatgtgaaaacctaatatatggagggccaactttttgtatgcacaggttccataaacttgagtatgtgtggattttggtatatacagagctcctggaaacaatcgcccctgtaaactgaggaacaactgtagtaggacacttcatacctcactttcttttttaaaatttgtacttttattttagatacagtgggtatacgtgcaggtttgttacatgggtatattgcaccaagatagtgagcatagtatccaataggtagtttttcaacacacgccccacaccctacatcccccctctactagttcacagtgactattgttcacatgtttatgtccatgtgtgctcaatatttagctcccacttataagtgagaacatgcagtatttggttttctgttcctatgttaattcacttaggattatgtcctccagctccatccacgttactgcgaaggacatgatttcaattctttttttatggttgcatagcattccatggtgcttaacatacaagtgcatgtgtctttcggtataataatctatttttctttgggtatatatccagtaataggattgctgggttgaattgtagttccattttaagttctttgagaaatctgcaaactgctttttacagtgactgaactaatttacattcctatcaacagtgtataagcattccctgttttctacagccttgccagctgttgttttttgacttaatagccattctgactgctgtgagatggtgtctcattgtggttttgatttgcagttgtctaaaatggttagagatgatgagcatcttttcatatgtttgttggctgtgtgtatttcttcttttgggaactgtctgttcatgtcctttgcctattttttaatggtgttatttggtttttgcttgttgatttgtttcagttccttatagatgctggatattagacctttgttggatgcatagtttgtgaatatcttctccatgctgtaggctgtctgttacagtttcttttgctgtgcagaagctctttagtttaattagttcccacttgtcaacttttacttttcttgtaactgcttttgggggacttagccaaaaattctttgccaatgctgatgtcgagaagggtattttctgttattttcttgtaggatttttgtagtttggggtcttatacttaaatcttgaatccatcttgtgttaatttttgtgtatagtgaaaggtaagggtctagtttcattcttctgcatatggctagccagttatcccagcaccatttattgaatagagagtcctttccctgttgcttgtttttgttgcctttgtcaaagatcagatagttgtaggtgtgtggctttatttctgagttttctattttgtttcattggtttatatgtctgtatttgtgccagtaccatactgttttggttactgtaggcttacagtagtcagaaggttgatagtgtgatgcctctagctttgttctttttggtgaggattgctttggttattcaggctctttttttggttccatatgaattttatgagaccaatgtgctgcctactccactaaggagtcaactccatatgaattttataatagttttttataattctgtgaggaatgacattgcatacctcactttcaaatagataagaagaccagacagaagataataatgaaataaaggacttgaaaaaccctacataccaattggacctaaaagacatatacagaatacctcatacaacaacaacaatagaatacacattttcttatttatacatgaaacactctccaggataggccatatattatgtcataaaactaaagttgacaagtgggaactaattaaactaaatttattgtcttaataaatttaaaactttagtaccataggaaatatttttttccaattataacctagccaaaaaaccctggaaatcaatagcagcatgaaaagtggaaaattcacaagtatgtggaaatgaaacaacacattcttaaataatctacatgtcagactaaattaaaagtaaaattagaaatatctggagagagctaaaaataaaagcaatgtgtcaaaattggtgggatgagaaaaaaagcagtaataggtgtgaaatttgtacctgtaaatacttaaattaaaaaagaagaaatatctcaaattcacaaccctattttacattcatgaactacaaaaaagaatctgaataagaaagctagtggaaggaaggaaataataaacattaaagcaatgatacatagagaatagaaaaaccaagaaaatcaatgaaaccaagagttggttattttcataagaaaattatgaaaacttcagtgagattgaataaaaaatgaagacagaaggctcaagaaactaaatcagaaacaagaggggacattattaccaatttttacagaaataaagatgattgtaatagaatactatatacaattgtatgccaagaatttgtataactagatgaaatagacaaattccttaaagcatacaccttaccaaatctgaattatgaagacaaaaaaatctgagtagacctctaactagtaaggagattgaatcagtaatccaaaacctcccaatgtagaaaagcccaggatcagatggcttcactggcaaacgcttcaacacatttaaggaacatttaacaccatagctgctcaacctcttcccaaaaatgcaagaagagagaacacttctttgatccttctgtcaggtcagtattaccctgatgccaaaccagaaaaagacaattcaataaaattatacaccaatatcccttatgaatactgatgcaagaattcaccagcaaaataccagcaagatccagcagcatattaaaaggattacacttagtgaccgaactgttttattcctggaaggcgaatataattatggttcaacatacaaatatcaatgtaatactccacatgagcagagtggaaggtataaatcacatcatgtcagtgaatgcagaacattcagtttcacaaaattcagcacctagcaccttttcatgattgaaataccaaataactagaaggagaataaactaccccagcaaaataaaggctatatatggaaattctcagagctgattgtcatactcaatggtgaaggactgaaagcttttcttctaatatcaggaacacaatgagttttctccacttttcccacatttagtcaatgtagtattggaagttctatgcagaacaattagatagaaaaagaaaataaagctattaaaattggaaacagaggtaaaattgtctatatgctaatgacatgttcttatatataaaaattctaaagaattcacaagaaaaaaaaactcttagagctagtaaagtcagaaagttgcaggaaaaatatctacatagaagaagcagttgtatttctatacaaaaacaattaatctgaaaaggaaaatagttccctttgcaatagcattaaataaataaattacttaggaactgtcttaaccaatgacaagaaacacttggacactgaattttgcaacatcttactaaagaaaattaaagaaggcaccccaggcatggtggcttatgcctgtaatcccagcactttgtgaggcccaggcaggcgaataacttgaggccaggagttcgagatcagcctggccaacctggtgaaacccctgtcttcactaaaaatacaaaaattggccaggtatggtggtacgtgcctgtaatcccagctacttgggaggctgaggcaggagaatcgcttgaactcaggaggcggagg[132 bp omitted]cgacttgatattgcaaggctgtcaatacctatatctatagattcaatgcaatccttaatcacagtaacatttttctcagaaatgaaaaaatccacctgagattcatgtgaaatatcaagggacactctctcccatggtcatattttagacctcgtcattttctagcaaatattcctccataataatttgcagcactactctccaacaactttgacttgtatttccaccttggtcccaccagcatgctagcatcagtaatattagaacctcgccaatacctacagtccactgagacgatcacctttttactctttcaactcctcgtgtactcacagcctgccaagcacatttcttgtcaggagaggacagctcacttctcctaatgtctcacttcccaaaattgtgtcccatgaaaatttctagctagatgaaggcagagaaagaaaatatttgatttcttaggctttatggaagcgataggaatggcaatagtggtttggaatggagactgcacgcaccagtcaacagggtgtgtcccgaataagcagtgggtaaaggacatttactgaaatgctatctccaactccacttcaggaaagcttgctgcagagttagagtgatatagtccaaatgctctgtttgagtcgcgggccctttgtctcacacgggcgagtccggggaattctgggaagtggagtccacacgctctgtggaggctcgagcacttccggtccccaactgtgacgttgctatttcatttaccacagtagtttgagtcatttccacatcttgcgagtccttccgaacgagtctcctttccttggggctcgcaaccacccaatgatcgattcaggagaaaagaagcctgggcggagagcagaggtttggaggggcgcgggcggggattgccgttccagtcagctgagccttctggcgtcggggggctctgctagggtctcagggagtgggattggcgcggcccggtgtgccctactttgacctcgcttagtccgcctccctcctccctacgtgtgcagcccctttcagtgtggtgtggagtgtcacttaatgtccgtttatcttccattgctggttcgtttgtttgtttgttttgtaacgggacttttcggaccatcctaatggattcattttgggacctgaaagaggtaacacaaatgagagccttaaaagcagtccctgtcactcggtgtctggtggtctcttgttaatttcccacgaagcctgtcaggtcctctggtggggtcagagctccagctgcaggggcgccggcccttctgcctgatccctgcaggacgctggatgatccctgacgccttctgacctctttttaggaaagtgaggggagcatttaacttttatgggggacggcaaaacggtcagggtgtttcacagctttctttttccccagcccgacctttctaaaagagctgcaggaagggacttcttggctactgatggcaaagctctacgtgagtgatccttggctttttttctttgacagagatgcttacctcaaccgagagtgtgtaggatttgtccctcgggcatgggtgtcgataatgattaagccttaattggtaactttattccaagtactttataccccaaaatacatgatcttcacagtggcactgtggagaggtgctgcttttttcattttaaagatgggcgtgagacacaggtggagcaggagttgaaacctaggcagtccaggttagagcctgagttgatcatctcttgaatgcaattctcattgaggcagaggtactagctgggaacaggtggagaacgtaagttaggacttgattgaaggcaccttgaggcaaggctcaggggcttggacttctataggagtttttgtttgtttgctttttgctttttaatttttttaaccttatctactattttctttctctctctctctctatatatatatatatttttttttttacagagtttcgctcttgttgcttaggctggagtgcagtggtgcaatcttggctcactgtaacctccgcctctcgggttcaagtgattctcctgcctcagtctcattttcgtcaaagggcccgcgactcaaacagagcatttggactatatcactctaactctgcagcaagctttcctgaagtggagttagagatagcatctcagtaaatgtcctttacccactatttattcaggacacaccctgttgactggtgtgtgcagtctccattccaaacccctattgcctaatcagtcattgtcaggacacaaacagaataagtaggaaatctataagctgacctatgtctctcaagatccaaaacaactttacacttgtcccttgtgccagtgcaatgctgctgtctcccaatagtctttggccgtaagattgaggtgacatctgcttgatgttgtaggaggcagtgaccttcaaggatgtggctgtgatcttcactgaggaggagctggggctgctggaccctgcccagaggaagctgtaccgagatgtgatgcttgagaacttcaggaacctgctctcagtgggtgaggacgggcaccccctgtaatggaatgtcaggccccaggagtggttttttaatcctagggttttcaagtttgagtgtgcagtgagaacctacatttccagtaaattttgcctggctattaggttggtgcaaaagtaattgtggtttttgtcattggaagtaatggtacactgcaattacgtttgcaccaacatgatattaccttgaacatgttgggattaagcatgtgactttgcctgttcacagggcatcaaccattccatggagatactttccacttcctaagggaagaaaagttttgggtgatggggacaacaagccaaagagaagggaatttgggtaagaaccaagcaattgtgtgtccctgcatgtgattcctgttacttctgtccatgcccatttccagcattttggggtaaatggccaaacctgtttcctggattattacagccttctccctgctgatgcccctgctcccacccttcccaccctgccatctgttcttacggtagccaaagtgatccgtaggaaacggaagtcacattgccattcctcagctcaaagcctttctggcttcttgtttttattagtgttacaacctctttaagtggcttttgtagaccctgtgatctgcccttcatcccacactgtctgactgcatctcctgtcctctcccccttgctccatcttttccaggcaccttgtcctccctgctgtttctctatcctgccaaggacattgtattgcctattgtggccggtgacataaaactcagcagactgaacaagaaacacttatctttctcttctgtaggcctgaagtctgacacatctcactgggcaaaaatcaagtggtcttagggctttgttcctttctggatgttcatggggagaagacttcattttggtttaccagtctctagtcactgtccacactccgtggctcttgtttcccttcctccatcttcaaaagcagctacattgcatccctgaccattcttccatagtcatgcttcctctgccactcttcttatgccttcctctttcacctttcaggtcccttgtgatagtattcatcactcctggatgattcaggatgaccctcccactttctgcttagctggctagtgacctcaatggcatctgtagctttaatctcccttgctgtggaacataacgtgttcataggttctgaggactggatgtagacatctttcaggaatgattattttctctactacaaaagcttctgcctccgagccctcacttgctcttctctctgattggaatacactgtccccacaaaacttactgacccctcttttagtttatgcagctctctgctcagttttaatatcatgggagaggtcgtctccaagcaccttattgaaaatactatcctatctttactcttcttggcctgcctgtgttgtgtctcatgtatttttgtctactgataagtcgcccctcccctttgcaatgtaatctcttgaaggcatttatctgtttctttatgactgcatcttcagcacctagaatactcctggtacatggcagttatctgtaaatatttggtattcttatgaatgaattaatggatgagaggacttgactgtctgtaagaatcatggagatagctaataagtaacagacatacaagagtgaatgttatatagtcatgccttggtagccgtggggtttgattccaggacccccttgtggataccaaaagccaaggatgctcaagtcccttctacatgtaaagtatttgtgtatatcctacacacaccctttcatatactttaagtcatgtctatattaggtataacaccaaacgcaatgcctacccatcgctttattcacatggattcaatgtataggactcaatgtgagaaattcaagttttgctttgtggaactctgtggaattttttttttccaaatacttctgatgcactgttggttgaatccatgtatgctgaacccacagatatagaggctgactatatgttgcaggacagttgttggtttgttttgttttgtttttttttttttttttttttttgtctgtgcagggctgcttatccaattttgactttcttaggttctcttgacatggttggttttctgtgtgtgcagttgacccacatcccatggaaactttcaagcatggttttcatgaccacattgagaaacatgccttccctggggcttacccttgagctttccttaaggaccgtgtttatgtctgtgagaaattctttatatctatgagctgaatgttgcttatatttccaaatgtttttcttcaaaaaatgtgtctatttctgcatctttatacaaatttaattgtcaaaaatgtgaaggaatatagattttactgaaatctttctttatatttatagagatatagtgttgtattttcatctggtgaactttatgacctgaaaggaattgggaaactgctctcaaaatagaaacctcccgaaggatactctcccttctctttaaagacttatttatacgtgacagcatattaaatatatccatgtactactgtgtactgaaaggtacatacttatcaattaatattttccaagattctttccattggaaaaacttggaagttatctttccattggaaaaatgtacctaattcaggacttggtaatatcctgacaaagttctaaacattttgtgagcattagccatagtaagaaacatatctgtcagtgtaacacggacaaacatttttcatgtgtgtagatgtgtgtgagtggctttagtaagcaattcatgtaatgacatttttcctgcttgtcataatgctgcaataattttcattctagttcttgttttgtaaatgtttattgcaggttttaactttatttcagctcattgaggcatagtcttgagtataaaaagttataaagcctgtttacctcatagactttcttttcattccacgtgtttctgaacaactttgattgtctgatcaggagcatccccctttgtgaacccctggaaggacagcctttcagattcccctcagaactacagttgtctgtccctgtactctttcagataaccaagttacttactatccatatcaaaacagaaaaataagattaagtatttttatacatgtgtaaaattattgtgggggaatactttgaaggtatagatattaaacactctgaggtgtttggtgttaacattgtgaagagttcaaccaactacgaagtttagtgggacgttttacagaggactgctctcacttcacatcaagtgaaaattcggcagcttttcaaaactatcttcatgtttagtaatttgctagaaagactcttagaattcactgaatgcttttatcctcacagttactgattcttacagggaaaacatgcatattatagttaaccaagagagaaactaaataagacagagtccagggaagtaccaaatccttattttctattgtattctcccagtggagtggggtatgttacattgtcaggattagcatgtgacttagacacagataactcccaatcaggggaacttacctgagtgctggggtccagagtaattactggggctccaatttcatagccatgattggttggttgattcccatgtggttgtttagtctcctggttcactgattccctgtgaggtaaagcccttccatgaatcacactgatgttctttctgatgtgaggagtatcaccccccatgccccaaaggagtggccagtcacaaccctaaataatattgtttcactatccagagttacccaggttttaccctcaagcaaagagactctcctcaggcatgacacttcaagatcctagagattacctctcagatgctgacgacaacgtcctgacctctttcaagttaggttaacttctttgtaaggatgtataacagacaaatatacaaactgtttattcgttattgcttctccttaaagttcctttggattcatatttcactacatatgtagtattttagctttataacttaccacacaaaattttagactgactaaaaaattcactagaaatagcaacaagtgaaatgtatatattaattttttaaataagtattttatttctatccagaattttacatatgagacatggtgtggttctaaattggtctcatgcaaaccaaaaaccagggtgcacttggaaaacagaaaaatgaacgttcattaaagttaaatcccacatcctaagtgtgaagtcttgaaaacactgaacaaagacttcacttgtccacatgtcttatttggtgtttttgttcgtttgtttgtttctgtttttgttttgttttgttttgttttgagacggagtctcactctgttgcccaggctggagtgcaatggcctgatcttggctcactacaacctctgcctcctggatttaagcgattctcctgcctcagcctcctgagtagttgggattacaggtgtgtgccaccacacccggctaatttttgtgtttttagtagaga[139 bp omitted]cttataggaggcaagatccaaactgagatggagactgttccagaagcaggaacacatgaagaattttcctgcaagcaaatttgggaacaaattgcaagtgacttaaccaggtctcaagataccaccataagtaactctcagttatttgaacaagatgacaacccctcccagattaaagcaagactatctacagttcacacaagagaaaaacctttccagggtgaaaattgtaaacagttcttcagtgatgtttccttctttgatcttcctcagcagttatattcaggagagaagtctcatacctgtgatgagtgtggaaaaagcttctgttacatctcagcccttcatattcatcagagggtccacatgggagtgaaatgctataagtgtgatgtgtgtggtaaggaatttagtcagagctcacgtctgcaaactcatcaaagagtccacactggagagaaaccattcaaatgtgagcagtgtgggaaaggcttcagatgtagatcagcacttaaagttcattgcaaattacacatgagagagaaaccttataattgtgagaaatgtgggaaggctttcatgcacaatttccagcttcagaaacatcacagaattcatactggggagaagccattcaaatgtgaaatatgtggtaagagcttctgtcttaggtcaagtcttaataggcattgcatggtccacacagcagagaaactgtacaaatctgaaaagtatggaagaggtttcattgataggctagatttgcataagcatcagatgattcatatgggacagaaaccatataattgtaaagaatgtgggaagagcttcaaatggtcctcatatcttttggtccatcaacgagtccacactggagaaaagccatacaaatgtgaggagtgtgggaagggctacattagtaagtcaggtcttgacttccaccatagaacccacacgggagagagatcttataactgtgataactgcgggaagagctttagacatgcttctagtattttgaatcataagaaactccactgccaaagaaagccattgaaatgtgaagactgtggaaagaggcttgtatgccggtcatactgtaaagaccaacaaagagaccacagtggagaaaacccatccaaatgtgaggactgtgggaagcgctacaagaggcgcttgaatctggatataattttatcattatttttaaatgacatataagttatacatatttatggagtgtgaaatttgatacatgtatataatgtgtgctgattaaatcagtttaatttcacctgaaacattatttgtgttggaaaaaattgaaaatctgttttttggatttgaaaacaagttactgttggttatagtcacctttagtgctatagaacaatagaagtgaagtagtgaggagtttgtttgtttgtttgtttgtttgttttgagacggagtgtcactctgtcgcccaggctggagtgcagtggcgtgatcttggctcactgcaccctccatctcctgggttcaggccattctcctgcctcagcctcctgagtagctgggactacaggcacccgccacca[131 bp omitted]aataaagttacaggatcaagggccagggtgccagagagaggaaaagagagggagagagagatttttcttgggactggaacctgaacaaacttagtccaggggaggggtgcagtccatcccactgcttgccaggttgatcaggcctgcaaagtcaaccttttcaatttgactttgaatagaaatcctgcatggatttctattcaggtgactcggatcagtaagacagggaaactttccactcattcctcttggatgtctattcaggcaacacaagccagtaaggattaggaaaggagaggcaaagcaccctgagtaagaaaaaagataggaagaggaaaagagagaaagaaaaaagggaagggattgactgggcatggtggcttatgcctgtagtcccagcactttgagaggccaaggtgggcagattgcttgagtctaggagttcaagaccagtgtgggcaacatgaggaaaccctgtctctaaaaaaacacaaaaattagccgggcatggtggcacatgcctgtagtatcagctacttaggaggttgaggaaggaggatcatttgagcctgggaggcagaggttgcagtgagctaagatcacatcactgcactctagcctgggtgacagagtgagaccctgtctcaaaagaaaaaaaaaaaagaaaatcattggccggtagggtgacgtggccccaatccctgttggactgaacaaaggaggatgaacgcgggaataaagataaagacaaaagagtatattcggaagaaggggtcaggaggctccttgcttctagtgaacaagggccctgagcttctagctccctttgtatttattgagcaaaggagatagagagaaggaggtggttgtcagtcagctgcttgactcagtgcaggcctggatgactgcattccctgaacagtagtctccagatattctagtagataacctcaaggagcacggcaccagggagtgattgaactcagcataccttctggtggcaggtacagatatgagtttgcccacatcctgcattcatgataaacagtgtgttgtttgatcatatagcctcactggactgctgagttggtcacgatcctccggctttcggctctctacagtagaggcagaggcaaggtccatgaggctggagaaagccaaccattgtggtaacactgaatcaaaagttcagtcaggtgattttcaatcatgaagaaatcttgtccagcagtcctgtcagctcacatgtctacccctcagggagagaaaggccccccatgtcccatgatcctagacaaatccccaaagaatatgccaccaaccacaggttcctgggctctgcaatagaaattgaaatgagactgaaagggttttcccagacaagccttcactggagcttatgcctggacataaggaaggcggcacaagagagaatttcctgactcccttcaaagagctcataggattgtttatttggcaaagcgtgggaattaacatcagggatagggtttgaaggctgggctgggaaaagcacatgactggtagggcatgcaggtcagcattacctggttgcaatgcttatcttgtgtactgggccacctggtggtctgggtggtggcaacaaggctgtaaatcaattgtttagcatttcatcctgaagggagacactctacaactttggttatcacccaaggccagttcctggaattcttagcagtgaggtagaggtgtgggttttgtgatcattgggaatgcatgaaagaacgctctagtcggggtgaactgaagccaagccctgtctctactctgtcaatagaactcagaagagttctactgcaagtgaagaaaagggtgactggaatcacctaacagagtcacagccccaaaatcaaatccaagacatgtccagtttacaaatccacattcatttacatgaaagggaggccaatactggatgagaatagatcctaccacatttcagagttctccacaggaaactatggccatgaacctgtgtgactatgtactcaaaaggagaaataatcactctttttgacaatgactgaatccttattgtcaaatggcacattaatgtgatgattggacctggtgagaaaaaagtagaaagtaatctagacatgtttgtaagacacatgcatatcagaaggacagaataagtcctataaatattcataggacttccacctcagtgaaatttccatgagttcactgatgcaaaactattgagatattccttctaggacaagcgtggtggtcatgcctgtaatcccagcactttgggaggccaaggcgggagatcacttgaggtaaggagtttaagaccagcctggccaacatgatgaaaccccatctttactaaaaatacaaaaattaactgggcatggtggtgggtgccagtaatcccagctctttgggaacctgagaaaggagaatcacttgaacccaagaggcggagattgcagtgagccaagattgcaccactgcactccggtctcggtgacagagtgagactgtctcaaaaaaataaataaagatattctttctaatctaaggtgtagggcaagtagcatgtgatgcttcctaaaaccaaaaaaagtgtcccaatgcccagtggccctgctcagctgttggaggctacttattcttcactgtggtgtactactctgctttttatgagtgacctgaaatcattttgcctcagttgagacaaggttgtgcaatatgtgccagctgtcatataagcttctcttccactagggtcctatgatccaggagacccacaagtgactgaaatatcagaaacagatagtgatgtttggagagagtggctggccacaactgatgaatcaaagcacaaacacatagaattttgtagcgaagccctgaaatcctctacgtatgtttactctctctctctcttttttttttttttgtacagatggggtctcactttgttgcccaggctggtcttgaactcctggcatcaagcagtcctcccacttagtaaagacagagcacttaaccatgggctaccaaattagcatgtgagccaaggtttccattatgaattgggtgtagttggccactccatatctttaaattgtatgtgcacattggtattccacttggaagtggtatatatgagattgggttggagcgggtcctgaagccacaggtaagtgcccctaaggcccattgttcctactcctgctacagtaccatcagaatgagtgaacatgaagataagtcataggaaattattgtgtctcagaagcaaaaaaaaaaaaaaaaagaaaaagaaatgagtaaaaatacacaaaacccaaggcaccatatatgcattataggtgtcctaggaggagacagaaaaagtcaaagagagctttacagaaataaaggctgaaaacttctcaaatatgaagaacacattattctgtaaatccaagctcaatgaatttcacataagataaaatcaaagagacccaattgagacatattgttaaaaattattggaggacaaagacaaatgaaaattttgacagcagcaagtccaaaatgacttgtcatgtacaaagaatcttcaataagatgtcagcagattttcagcaaacatctgaagacagatgatgtattctctgctgaaaaaaccaaaaacacacagttgtctactgagaaatcaatattcagcaaaactatccttcaaacatgagagataaattaatacttttctaaagaaacaaaagccaagagagtccattaccggaagacaatttatatgagaagttataaagggatgccatcaagttgaagtgaaaggatgctagacagcaacttgaaaccatatgaaaacataaatatctaaagtaaataaaattacatgaatgatgtaaaactcactatttttgtaatttgagtttttactccactttttattttgtacactatgtaataggaaaatgcattaaaatgattgtaaatctatgtgaatgggtacacaatatgtatagttgcaatacatgataccagtcacataacatgaagggaagcagaagttgtgaaggagtagcgtttttgcatgtgactgaagttaagttggtatcaattttaaatagatggttataactttagaccatagcatgtagaatgttatgtttcttcaaataaagaacatatcagtgagacacacaaagggaaatgagaagagtttcaaaatgtatcactacagaaaaaggactcaacataaaggaaggcagtaatggaggaaattaggggcaaaaggcagtaagacatttaaaaaataacaaaatggtaagacctttcctacaaataatgagtttagtgtaaatgagtgaaactcctcaaccaaaagatgttcactggcaaaaccattgaaaaaaacagtatccaagtgtatgctctgcacaagggatatgcttaaatctaatgatgtgcatagattgaaacggaaaggatggaaaaagttattccatataaatagtaataaaaagagagcaacggtggctttactaagggctaaattagactttaagtgaaaaattgttagaagagaccaagaagaacattatatattactaaaaggatgatttcaccaagaagatataacaattataaacatatgtgcaccaaacatcagagctcctaattatatgaagcaaatacagaattgaagagagaagtagctacccaataatacagttgactgtgagccacatggatttgaactgcataggtacacttacgtgtgaacttttttcaaccaaactcagattgaaaatacaatattcatgggatgtgaaacccacatatatgaagggccaaatttttatatacattggttctacagggctgaccgcaagacttgagtatgtatgcattttgatatacccacatatactaagggtcaactgtactaggacacttcatacctcacttgcaaatagccagaccaaagatatgtaagaaaaacaaacaaacaaagataagtaaggaaatagaggatttgaagaatattatacacaaaattgacctaaaacacatatacggaataacccacacaacaacaacagaatatacattttctcatttgcacatggaatattctccaggatagctatatattaggccacgaatcaagtgttaataaattttaaattttaatataataaaatacattttttccaattacaatctagatcacaaaaactagaaatgatagcagcaagaaaagtgaaaattcacaagtatgtggagactaaacacattcttaaataacctatatgtcagagtaaattagaagtgaacttaaaaaatatatggagaccattgaaattaaaaacaacgtgccaaaatttattggatgaggtaaaagcagtagtaggtgggaaatttgtacctgtaaatgcttatattaaagaaagaaatatcttaaattcacaacctaattttatattcatgaactacaaaaaggcaaagaatttgaaccagaaagctagtagaaggaaagaaagaataccgattaatgcaatgacaaatggagaatagaaaaacagaaaattaaccaaaccaagagttggttattccagaagattaagaaacttgagaaacctatagttagattgactaaaaaatagagaagcctcaagaagcaaaatttacacacaaaaatatgaactttactgcaaattttagagaaataaaaatgattataacagagcactatctttaattgtatgccaacaaattgtacaacctagataaaatagacaaatctcttaaaacatataccctaccaaaaatgaatcatgaagacagaaaatctgagtagatccttaactagtaaggagattgaatcagtaacccagtgcctcccaacaaagaaagcccaaaattaggtggctccactggttaattcttgcatttaaaaaaaaaattatttttatttttagtaacccttattttacttagtaagaattattccaaacatttaaggaacacttaacaccataactcctcaacctcttcccaaataggcaagaggagggaacacttcctagttccttctctgaggccaggattaccatggtaccaaaccagacaaagacattgcatgaaaattatacatcaacatcccatatgaatactgatgcaagactctaccataaaataccagcaaaattcagcagcatattaaaaggattatactcaatgaccaaacatttattcctggaatgcaaatataatttatgactcaacatacaaatattaatgtattatgctgcatgaacagattgaaagatataaaaatataatccacatgatcatgtcagtgaatgcagaaaattcatttaacaaaattcacactttcatgattaaaataccactcaactaaaaagaaaagaaactatctcaacaaaataaaggctagatgtggaaaatttcaagagcttattttcttattcaatagtgaaggactgcaagctctttttctaatatcaggaacacaatgaatttgctccacttttccacctctagtcaacatagtattggaagttctaggcagaacaattaggtagaaaaaggaaataaacctgttaaaattggaaacacataaaactgtgtctacatgctgatgacatgttcttataagttctacagaatacacaagaaaaaaacctcttagagctaacaaagtcaaaaagttgctggaaaaatacctgtatagaagaagtagtttgtatttctgcacaaaaaaacaatctgaaaggaaaatacttatcttgacaatagcatcaaaaagaaacaattacttaggaactgtcataaccaaggacaagagaagcacttgaacactgagctctgaaacatattactgaaggaaattaaaagaggcacaaataaatggagatatatccattattaatgagttgagagataaattacaaggcagtaaataccacctaaaatggtctacagattcactgcaatccttaacgtaatcacaatgattttttttcagaaatggaaaaatccacccaagattcatgtgaaatatcaagggatgctctcttccatggtcataacctaaacattgtcatttcctagaaaatactcttcggtaataatttgcagcactagtccgcaacaactttcatctgtattgccacctgagtcccatcagcatacttgcatcgataatcttagtacctcgccaatacctacaatccactgaggctatcacctttttgctctcttaatcccttatgtcctcacagcatctcttgtcaggagaggactgctcacttccttttctatcttacttcccagaatatgtcccatgaaaatctctagctagacaaaggcagagaaagagaatatttgattttttaggctttatggaagagaaaggaatggcaataggggtttggagtagaccctgcaagcactagtcagtagggcgtatcctgaataaatagtgggtaaaggacatttgtggtgatgctctgtccaattccacttcaggaaagcctgccacagagttagtcagagtgatgttttattagaataatgctgacctccatgtttttgatttttgaattattctcacactttggaattaaggaatttctcattacaaattatgctttagatactttgtgtataattatgctcttggtttctaagcattgctgtcaggttatacagggcagtgagtagacatatctgtgaagcattaactctgggcattgtggtgagtgtaatggtagaagtattttcaatgtgttgtgagggaagggaatataccaattcatgataggtgagtgggctattggtataagtgaaagaaggtccagctgcttatctcttatagaaaaaagccaaaataacaacaggaaagtgtgataaaaagagtgaattttattacttgttgctagcaagggaaagagtgattggaatcttttccaaaagttgccacttttcaatttctggagagagggccacagtttaagaagtgggcttggaatgcagagaggtaagggggtttaggaggtacctgatggcatgtctcgctctgatgatcttgaattattgttgcatctggtgaaggggccagcacgatcatgggctcaatcaggttataaattaatggactgtcaatcttgcagttcatctgtagccaggaggagagaattccagagctgcctgatcctcatcagtattcttcccctgaagcttctaaggaaatatgtgagcagataagtgagcgcggtgtgagcttaacaagcatcctggtaaataaatgtgtatagggcatggaagcataaggtgggaaaaagaagggagtggagttttaaagcagatttggaggctgtatttcaacacgaaagaaaacacatctgtagtttgtctcaaagctacgtcttgagactggggagaagtgggaaagaaaagacggtctttaaaatgtagtttgaagctaaggtgcttggttacacaggccccaaaatactattaggccaaccagtccaaccttgcttaaacttgagtaatgattcaaatatcataaaatgcatcactttaaaatatatcctttagtggttttttagtaaattcccaaagttgtgcaactgtcactactctctaatttcaggttttttaaatcggcccagaaagaaatcccctatccattggcagtcactcccaatcctcatcctttctccactagctcctggcaaccattattctactttctgtttctacagatttgcccattctgaatatttcatgtaaatgaaatcatacaacatgagctctcttctgaatcacatctcttagctttcatttctcttggtgtatacttaggagtgaaattgggtaataagctgtattagtctgttttcccactgctataaagtactacccgagactgggtaatttataaagaaaagagatttaattgactcacagttccaaggattgacaggaagtatgactgggaggcctcaggaaacttacaatcatggtggaaggtgaaggagaagaaacattagaacagaaaagagagagcaaaggggaaatgccacacacttccaaacaaccagatttcatgagaactcactcactatcatgagaatagcaaggggaggtggaggttgctatgagctgagatggcgccattgcactccagcctgagcggcagagcgagactctgtcttaaaaaaaaaaaaaaaaaaaaaaaaaagacattccttagaaaagcagggattgataataatcagttgtgttatctttttgtagtgaaataatttgaaattcacaggaaattgcaagggaagtacagagaaaccccgagtcttccatctacattcttaattacattttacattttacataattttagtaaaatatcaaaaccaggaattcaacattggtacaatgtgtgtgtataccacttttatttgtcgtatttcatgtagatttaatggaatcaccaaggcagtgatgatacagaaagaactattccatcaccacaaagatctctcttgaagtatccctttatagtcaacccaacttgtgtccctaccattcattacccctagcaactactcatctgatgtccatctctacattttgtcattttgggaatgacatatagatggaatcatgtattatgtactttttcagattgtctttttactcagcataacaccctttagctcaacttgtccagccagtggcacacatgcagcccaggacggctttgaatgtggcccaccacaaatttgtaagctttttaaaaacatcatgagatttttttttttttgctattttctttttagctcatcacctatcattaatcttagtgtattttatttaatgctgtgagtatctgtttctgtgttcaaataccatccataactcttcttaagtgaattgggtctttgtgttttttgctccttttcttcttagactattttatggttgagttgtgagagttgtttatatattgtagatataaatttttcgtcagatatgagatctgcaaacactgacaaagctctaggtactgacagttttcctacactgtcttcttaaaattttatgattttacattgatatttcacatttaaatctatgatccaatttgacttaattttgaaataaagtctcagattctttttcttttatgcacatggatgttcagttttcccagcagtctttgatgaaaacactgtcccatttctatttatttgctttagcattttggcacaaatcattttgttatagttggttagggtcatttctgggttatctattgtgttccactgatccgtgtgtctatactcagagaatattactctgccttggttaatgtagatatataataactcttgacattattagagtgattcctcccactttattcttcttttgcaaagttgttttaggtgatctagttcctttgccttttgatatgaattttttatctattaaaaaaacttgctggccagggtgtggtggctcacacctgtagtcccagcactttgggaggccaaggcaggcagatcacctgatgtcgggagttcgagactagcttgaccaacatggcgaaaccccgcctctactaaaaatacaaaattagccgggcgtggtggcgcgtgcctgtaatcccagctactcgggaggctgaggcaggagaatcgcttgaacctgggaggtggaggctgcagtgagccgagatggcgccattgcactccagcctgggcaacaagagtgaaactccatttcaaaaaaacaaaataaaacaaaacaaaacaaaaaacaaaaaaacaacttgctgtgattttgatagtaattatcaaaaagctgtgcatccattgggagagaattgacatttttactatgttcagtttcacaatctattaatatagaatatctctccatctatttcatgttgtttaatttttttcatagtgctgtaattttcaacttgcaacctgtgtaattcttttgtcagatttatacctgaatatttaatttattttggtttccatgtgtttattgctattataaagaaatacaatggattttggtatgttggtcatgtatcctatgatcatcctgaattcacctactatctaggagctgaggggataggaagacttcacattgtaaagatgacactactacccagagaattatacacttttcatagaatctttatcaaaatcccaacagccttttgtgtagaaatagaaaagccaataccgaaattcatatgtaattgcaatggccacaaatggaaaaatcaatcttgataaaaatgaacaaagtggataacttgcactttctgatttcaaaacttttaccaagctatagtaatcaaaacaattgttttatctatttaaaaagattctagcatacaaagttgttctagcatacaaagatatatatatatatatatatggagagagagagagactaatgggctaaaattgagagtccataacaaaacccataaatctaaggccactttattttcaggaaacattcaagattactttatggagatagaatagcagccgatactgctgggacgctgatacatggacatacaggataatgaagttaggttcgtacctcacactatacttaaaaattaactcagaatccgtaagtgacctaaatttaagagcttaaactataaaactcttagaaataagcatagagataaatcttcctgactttttatttggaatggattcttcaaagagacaacgtgagcagaagctaataaaaaatacataaattggacttcagtttttaaaaattctgtgcatggatatacatggtcaagaacacaaaaagaccatgcagcatgggttctagtatcccgaatataaaaagaattcttataacgcaatgaaaaaagttgaa[136 bp omitted]ctgtctctactaaaaatacaaaatttactggatgtggtggcgcatgcctgtagtcccagctactcaggaggctgaggcaggagaatcacttgaacccaggaggcagaggttgcagtgagccaagattgcgccactgcactccagcctggcgacagagcaagactccatctcaaaaaaaaaaaaaaaaaatgggcaaaggacatacatgggcatttccagtatacaagtgaccaataaagggctcgacaccattagtcatgaggaaaatgcaaatcaaaccaacaataatataccactgacaaccactgtgctagctatcattcccaaaaatagaaaataatacatgttggagagactgtggagaaattacaaccttcacacattgaaggtgggaacataaaatggggcaatttttctggaaaactgttttgtgatcctcaacatagaattaccctattaatcatatctataattcatataatttcatatctaggtatttacccaaaggaactgaaagcaggtaatggaataaatatgcgtataggaatgtttgtagtagcactattcacagcagccaaaaggtggaaagaaccaaatgttaccagtagatcaatggataagcaaaatgtagtataagcacagaataaaatattattcctgtataaaaggaaattatgtactgatacatgctgtgatgcagatgaactttaaaaacattatgctaaatgaaaagggtcagaaacaaagatcccatactgtgtgattccatttatatacaatgactaaaacagataattaaataggatagaaagatttgtgtttgccagggataggggtatggccaatgtgagtgactgtttagtggggatggagttttctttgggtgatgaaatggtttagaacttaagaggtcgtggttttgtatttgtacgaggtacccttgccattaaattatatatttttaaatggttaattttattttttgtaaattacacttaaagaaaacttatttaaaataataaagactatgttcaaaatatctggcatagccaaaaaacctagaagcacagtcagagaaaactcaaactatttttttaagaaaacatttggaagatatgttaatattgtaaatgtataaataatacttaaaattaaggagaaaagaccaaaaacacaatagaagatgggacaagagatttgtacagtttccaaaaaatataataatggtccttgaaaatatgcaaagatgaggtgcagcaaaccaccatggcacatatacctatgtaacaaacctgcatgttcagcacatgtatcccacaacttaaagtaaaataaagaataattattattattataataaatgtcataacattttagagggggaaagaaaattagagattatcttatacaacttggttattttacaaatgacaaagctgtgtttctaattctttaacttgtgaataaatgtgatgaataaatgtggaaaaaaaggaatataggcctgactgtgacatttacagggttcagggcaagaatacaaatggaggcctacctaccatatgccttgatatttaagtgtacaaagcaagctaataacatgtaaaataaaatatgttctacccttataaaaaaagaaaatatgcaaagatattccatgatatttacaaaaaaaaatacaaattaaaactacatttagttaccatttcttaccattagattgggaaaactttaaaaacatcaaaataccacattctgttagctagtgtcaaggcaagacattcctcatacattgcttctggaaatgaaaaatagtataaaatataaaggcaatttgacaatatgcaacaaaatacacttctattcccattttggccctgaaatcctactttttgaaatgtacccttaacatatatcatcaacagggagaaaatatatatgtatgagtttatgtatcatggcattgtttgtagtaataaaatattggaaaccactgaaatgcccatgaatgggtgcagtattgaataaagcacacaatggagtttgtggagttgtgaaaagcatgtactctatatgaagtgattttccaggatatattgttgagtgaccatagaaggtttagatgaatgctaccttttgtttaagtaaacagcgaaaataagaaatctacatgttttctgtaaaaactggtaatgataaaccagaaaataatgaaattggttacacatgggtattaggagtcaacactgtggaagtggtgcggtggaaaggaggggagtgagtggcacttttctgagaataacattttgtatagtatagacttatgggaatatgttattgattgacataataatataaaatcaagaatggagataaaccaggaaacttaaaatcaaagaataacagactaacctaaatgcattcaaatcaataacacagactaaagatgaaagcaagaagtcatttaagtaccatattaaacacagtacagtattttgagtatatgtcctcagcataaagacaaaaagaactgtaatgatgttgaactctagttagctgagttatttttacaataatatgacttagtaattatgaaactacctgatgcaatggtttaaatgtttgtggaccactaaaattcacatgtttaattccttacccccaataagatggttttaggaggtagagcctttggagggtgattagattatgagggcagaactcttattaatgggatgagtccctttgtaaaagagacctgaggaaacttgttcatcacttccaccatttgaggacattgcaacaaggtgccacctatgaaccagaaagcagccccacttcagacataaaatctcccagtgccttgattgtgaggaataagtttctgttgcttataagccagctagcccatggttttttgtgactaagaatattggtattgagaagtgggattgctgttgtaacaaatatctaaaaatgtggaagtatctttgtgactgtataatgggtagaggctgggagacttctgaaatgcatgctaggaaaaacctacattgtcatgattggactgttaaagacaattctggttagggctcagaaggacagaatgagagctagagaaagcatcagtcttcttagagtaaacctatgtggtcacgatcagaatgttgatagaaatatggacagtaaaggccattatgatgagacctcagtcagaaatgtggaacatgttactggaaactgaagaaagcggggttcttgttataaaggggtaaataatttggctgaattatattcaggtcctagtgttttttggtaggtagaacttgtgagcaatgtaattgaatatttagctgacactatttcttaacaatgtgttgaagttgcatcttgaataatcttgactacctatagtaaaatgtagaaagtgagaagtgactgaaagccggaattactaattaaaaggtaaagagaactaaatacttttaaaatttgcagcttatctactttggaaaacatgcaaaaccctgtcctggagaaaacaagggtgtggctgaacaactgatttatgagattagtatggattgaccatgttgactcaaaccaggacctattgtccaagacaatggaagaatgaccccagaagtatttcacagatcttggaggctgctcctcccatcagaggcccagagcacagggacgtgggcaacagcagggacctttgatgccaggtgccgcctaacatctcaggctcagctccttgcatacactaccactgagagtatcaataaattttatcttttgtgaatgcagagtagagtaaggatacagctgtaattggtataggaatagccatcactcaattttcaagggggcattgaaaatttgtttggcactatgtggttgctcagtcaccttaatttttgtccaaaccaaactgtgaaacgtcagccaggtgcagtggctcacacctgtaatcccagcactttgggaggccaaggtgggcagatcacgaggtcaggagattgagaccatcctggctaacacagtgaaacccccatctctactaaaaatacaaaaaattagccaggcgtagtggcacatgcctgtagtcccagctacttgggaggctgaggcaggagaatcacttgaacccaggaagcagaggttgcagtgagccgagatcgcgcactgcactctggcctgggcaaaacagcaagactctgtatcaaaaaaaaattgtgaacagtctttttttaatttttttttatttttttttactttaggaaaatggatacaggacattagactctttttaaaaagaaaaatataggtcgacaggtcaatgtatgtttatttgggaggacaaaaaatatggtttatcttcaaaagagaattttagatgaattgtttcctgatttagctttatactattattaatgtctttcaactaacatatgccagttttcaaattgtttcctataatgaagatattttaaccaagaaatggaaaggaagaaactcttaataataaatcatgctccgtcacctatagaatcttctccagttttatggcattgaatcagacattgggtgtcagattgataccaatgccaagctcttcaacagttatacttgctttaagatacttagcaattcactaacttctctgaaatttagcgtttctacatctaaagtagaaatattactaccatgagaatgttaaatgtagcttttccatgaggacacagcttctccattggtggctggaattttgtttttcctgtcaaaccagtggtaccacagcatctggactagggctgtaactgagaaccaccatttttctaagagacagcttatttatttctctctcttttctcattcccttagttccccacttcctatgtagccctttaaaaatgcaaatatagacttttacctccccttcaccagacacttcctacagggaaagttcatctaactgtgtgctccaagccagaactctcctccagaattaacagtcaatttacaaactaaagcatgctggcctctgaactctcactcaccaggaggttgcctgaagagacaacagttgaaagcgtgcctgctactctctcccttctggttacaacttatttctgcccatgaaaaagccagctcaactgcctaatagataaggcaccaagccagcacacagaccccttccctcttcctcccctaccttttaaaagtgcctgctttctgctctaaaagccaagccgtgcacttaaagacaacacctgtgctacttcccctacgctagctctagaataaatcactttctttataccagatctccctcttgttaactggacgttgcaaacgggaagccactgatctacttttcagttacaggggctgatgctttcctggcttctcattgcccctcccaacccattctacctggctcattctttaaaccagtggtccccaaccgttttagcaccatggaccggttttgtggaagacaatttttccacggactggggaatggtttcgggatgaaactgttccacctcagccattagattctcataaggagcgcctgacctagatccttcgcacgcacagttcacaataggatccgcgctcctatgagaatgtaatgctgggctgatctcacaggaggtggagctcaggccataatgctccctcacctgccgctcacttcctgctgtgccgcccggttcctaacagtcagtggaccggtacaggtctgtggccctggagttggatatccttgctttaaaccctgagcctcctttcagccatctgacggctcaacagtcactctatctagctccttgaatattgtatctcctcgcttgttccctgtccaagaacactcctgtcaatcatgggagacatttagacttcataaattctttctattcaatattttcgctcgaggactctgggaaggacaactgtcagggtaacagtctgcattccccaccaggaacctggggctatgaaattcgttccccgtgggtgttgcgggaagtgtaatcgaggagcaccatgtagtcgcaacacttgagcctaaagggtgaggtgatggacattttccttttgcatctgaggctctgcagtccagacaccttgcgggattcctgatacttcagctcaggtaggcgtttccggagaattctgggaagagtagtccattttacgggaagtgtagtccactggctcgtggaacactgggtattttggctctggcaggtgaaccgttgaattctgggaacgatagtccagacactctgcggagtcccgggccctttggctcaggggggcgggtccggggaattctggggagtggagtccagacactctggcgcagagaggacacttccggtctcctagtctgaggttcctgctttaatgaccggggtagtttgagccatttctgcgtcttgcaggacattttgaacgaaccccctttgcttgaggctcgcaaccacccgatgatcgatgatcgtctcaggggaaaagaagccttggcgaagagcagaggtttagaggtgcgagggcggggagggtgtttattgttcccgtcagcggagccttctggcgtcggggggctttgctcgcctcccggggggtgggattggggtggccttgtgtgccctgctctgagggtttccaggactttgacctcgctcagtccgcctccctacgtatgcagtgtgtacactctttctcgcagtgtgatgtggaatgttaatgtctctgtacttcccattgctgttctttaaaatggtgcttatagggtcatcctaatagaattgttttgcgaattgaaagagataatacaaatgaaagccttaaagttgtccctgtcacttggtgagtggtctcttgttgcctgatattttaaaacgtttgatatcatttcaaagctatagaaaaattgcaaaaacagtataagaaattctcatataccctttacccaaatttgccaagtgtttacatttttcctgtttgctttgttgatgaccatcaaccaaataccaccaggaacatacctgtaaccagagacagctgattggtagctttctgcagcaaggaagcccacataccacggtaattgtggggtgtcttggtaagaggcatttaggaagggctggttatagggtttcacataacatggtagataatattggatattatgttaaataatactgttaccgattacatgtcagatagatgtgttaaaagaatactagtatttgtagtgtacttactagatagtgttggatagcatattacctagcatcatgttatctaatctgcagttccatatacgaatttgttaaatttttcatttaaagtccttatgactgtcctctgccccacccttcacctattcaaagtccagtttatgcgttgtctttagctgtcacatttccatagttgttcatttggagtttgatattgaagggggcctgcctctccacacctgtgggtgtttctcacaaggtggaaatgagaaactgagaaaagaaataagacacagacacaaagtatagaggaagaaaagtgggcccaggggaccggcgctcagcaaatgaggacctgtaccggcactggtctctgagttccctcagtatttattgatcactatctctactatcttggtgagggggatgtggaaggactatagggtaatggtggggagagggtcagccggaaaacatgtgagcaaaggactctgtcataaataagtttaaggaaaggagttgtgcctggatgtgcacataggccagatttatgtgtgactttacacaaacatctcagtgcagtaaagaccagtattgccgccagtatgtctcacctccagccataaggcggttttctcctatctcagtaaatagaatgtacgattgggttttataccgagacattccattcccagggatgagcaggagacagatgccttcctcttacctcaactgcaaagaggccttcctctttcactaatcctcctcagcacagaccccttatgggtgtcgggctgggggacggtcaggtctttcccttcccacgaggccatctctcaggctgtctcagtgggtggaaaccttggacaatgcccaggctttcttgggcagaggtccctgtggccttccgcagtgtatggtgtccctggttaatcgagactggagaatggcaatgacttttaccaagcatactgcctgcaaacacatttttaccaaagcacatcctgcacagccctaaatccattaaaccttgagtcaatacaacacatgtttctgcgagcacagggttggggctagggttacagattaacagcatctcaaggcagaagaatttttcttagtacagatcaaaatggagtttctcatgtcttcctttttctacgtagacacagtaacagcctgatctctttttctttcccctacagatatatttcacatttaggtttagattatacattgttggtggggattccacaggagtgttaagatgcccttttctttttttttttttttgtttgagacagttttgctcttgtcacccaggctggggtacaatggtgcaataggatgcccttttcattgtaacataacaaggtccaagtgatgttcgtttgtcccttcattggtgatctcagctttgtcactggccaagaagatgtctttcagatttttccactcttatgttacttttttttaaattatgaagtttcttatgggaaaatacattattagtgggcattttcttgtaaaaaagagcttccatttctcctctattggttcattgatttgttcaactataaatattctatcaatgtggactcagaatccagtcttattgattctaatgatatgtgcattaacagttttttttttaaactctaggtttattttagttatagcattcacccatttcaggtatacaagtcagttcagtggtctttaggaactttgaagtggggtaatcatcatcataattcagccgagatcactttcatcccccagttggactcctcatgcccatttactttgaacctcattctcaactcaaatttagaacaactgctaacctactttctattctattctacttgtctattccagacatttcatataaatggaatcgtagggtctgtgggtttttgtgacttgcttctttcatttactgtaatgttttcaaggttcacgggtgttgttgcatgggtcagtatttcattcctttacatttccaaataagattccattgtatgaatatgccacaatttttctgtccctttacctgtaggagagctttttggttgtgtgcaatttggggttagtatgaataatgctgctgtgagcgttcatgtgctaattgacaatatgagtccttgttggtgggtgacatccctggccaccctttcatgtctctttttctgtcttcatggcactttccaggcacaattctgctttccctggaactgtgtcattcaggactctgcaaattccctaaagtaggaggaaaaatgaccatgtccaaggtaagtaggacttgcctctcttactgttaaaattccatctcactactcagattgttgtgtgtttttctctgccctgggaagactcaaggagaacagcaggactttgaggatctcttgtcacctggctaatttttgtagtattagtggagatggggt[131 bp omitted]gtaatactgggctgggtgcagtggctcacactggtaatcccagcactttgggaggctgaggcaggcggatcacctgaggtcaggagttcgagaccagtctgaccaacatggagaaaccccatctctactaaaaatacaaaattaactgggcatggtggtacatgcctgtaatcccagctactcggtaggctgaagcacgagaatcacttcaaaccgggaggcggaggttgcagtgagctgagattgggccattgcactccagcctgggcaacaagagtgaaactctgtctcaaaaaagaaaacaaaacaaaaaaagtctagtaatactgaagattggccagtcacttgtgtactgtcactcatttacttctcaaagcagcagaatgaggaggttcctgatctcttctcctaaactcatgaaatatgagaaacctgctcaaaatcagaggcaatcaaggaacaggaatgttagccattctgctcaagtgaaagagagagacgagaagaaagaaaaattctccactgagggtctggtgacctgttgtgtggatgtctggagtgctcccttgagtgatgacatccataggtggcgctgcttctccctgtcctgcgttggtgtgacctcttcttttccagacctggcacctactcaggtgtactcattgttccaagtacccaaggacagtgattaccacagctgttcttatctccaaattcctccttatggcacaagatacctcacacattttttctttggctgggcgcggtggctcacacctgtaatcccagcactttttcggaggctgaggcaggtggatcactaggtcaggagatagagaccatcctggctaatatggtgaaaccccgtctgtactaaaaatacaaaaaaaaaaaaaaaaaaaaaattagccgggcgtggtgcgggcgcctgtagtcccagctactcggcaggctgaggcaggagaatggcgtgaacccaggaggcggagcttgcagtgagccgagatcgcgccactgcactccagcctgagtgacagagtgagactctgtctcaaaaaaaaaaaaaaaatccctaaattcctccttatggcataaaatgcctcaccattttttttttttttttttttttttttgagatagagtctctctctgttgcctaggctg[133 bp omitted]ttttagtagagacggggtttcaccgtgttagccaggatggtctcgatctgacctcatgatctgcctgcctcggcctcccaaagtgctgggattacaagcgtgaaccaccgtgcccggcccgcctcacacattgttaccagaaaaaatgacaacctggggcaaaaatatttaccccttggatagttaaggaagaataaatccagaataagaatcttctaaaaggataaagaaaaaagttcaaacagattggaacaaagaatactaaaaggcaattgtaaaagaagaaatagagatcgccaataatcttgaaaagtggtgatactcatttataataataagtgagaatgatagaatgaattgttcttcctaatcagattacaaaaccatgggaatatttataaactgctcttggctatcataaggagaattagggtacttgtattctgttgaatgattagagaggtagggaaaaaagtgagaagaaagtatgcaattatataatgataatattaaatgtgcttatttttcacattttaattttcatatgaaattattttaaatgagacagagtcagatgttcttacatcttactacttaccatatcatcttggccggactgataatggaaaatatgtgaaattaaatatttattatttagtgtagctaaaaatagatcatcagttccctggaatactatggaaccctgaaatagataatggtaataacagtaataagtaataccagctaatgttcattaaacagtctgtgccgtagacttttcaaaataccgtatatttcttttcttaattcttgaaaaaactcttgtcatgtaagaactattattcagagagggaacaagccttgtaggaaaacatgtctgaggtcacatggttagaaatgggcagactctcagaatgtgcactgaggcattctggcttctgatcaggacactaaatgctgcaataagcatatgtggtttgtgccttgcgagtacagaagacacactgcataactgtctcagggtaccatggagcaggttcactgtgcactgattaccaactcgtgtgagtcctgtgggacagaacacattcacacgcaacagattgcatgaagcagatttattactacagattggcagcaggcgagcccagaagcctagggtccagtatgagctggccatccagggctcaagaaagctacctggagcagatggaatcttgactgtatgtgccccacttgcaccagagctgaggcaccccagaaggtaacctgcccccatttatatacttcagggtgccatgactcatggagaaaaacttgaaggtcatcttccttccaggtgagagaggaacaaagcccagactgtcaaaggcagttcctccccataatattgcattcttagaataatctacagttattcttgagaactacaagcaataaaggggagagagctgggtggggtctgcaccccaactgtcctgcagtccatcccctgacccagatatccctcttagcaaactggtccatttcatatgtccatcgacctcccctggcctcccctgatcttgttagatcagtgtaacaccttgactgacacaatctctgccaacttcatggaattatagctggaatacattccgtggaccccagaggagcatgaccacaagcagcacagccagaccttcctgaagtagtaatcctgcccaggtcccagttatcaaaataagaagctgctgaagataccaaagaagaatcattcaggtggccccagtgtctgaagccagtggacctgcttctgggttgcctctcattgagtttttacaatagctatgtatccagagaaggccggaggtgttggcagttgcagacccactcctcccagtagggctaaaagcacagagcacttgtgttttttgaaccttcctgagggagtgaagggatgttgctgggctcccaaggcagtggccgtggaataaacagtatctatcggccattgcctatggcaggtgtctcatcatttttcatgggaattcacttgtaggtgtaggacataaatctggagctagctgcacctccaggcaggtccccagtcagcctggggcacagctttagccttcttgcccagtggtgcatctcgcttccagggtgacatctaggggcacccccagcatgcctaatgtttgggatctaacagtctgccagctttccaggcatgacattgcccaccctgtatctgggtcaccctccaaaccaaccacagagaaagccataaggctcaggtgcacacagcacccattcccttgtttgggtgttctgtgacccatttgtgggaatggggacattatcttttgccagccacatctcatttttggcacagttgcataaggtcagttcccccagtatgacattcatgcggcccttacagagaggaataccactcatccagtcctggttttcattatgtggaacatttctcatccaggtaatcaaaggaacatggtgcgagaaagcacagtccactgtagctttgttgaggttgtgtgattctgctgccttacaccagttaccacagggccctccagctctctctcatgtggcaggtgccaggttctgacgtgacaagccagggttatggagctgttggtgtgcactgtggcatgaaggatgctggtgtggtttaccatagtcaggatgagagggtcactgtggttggtgatagaataaatgcagggtagcagatggaacacttagccaggtgacatgaggtgactgcagcttgagataaggaatgtgctgtgcttccaggcctctgctgccatatccttgggggaacagcagattaatagctgttggatagtgggtgggctgaggtggtgcagcgacccagtctgtctgtccctgtcctgaggctactaccattgtagacatccattcccctggttgtttggctcagaccttcctgcctcagttgttcagtcaggaagggacgtcacgtcctatacaaaaaatgcctgctagtgccagccacccaaatgggatcaggtgtccccagtaccatcagaaggaccctggtgacccctatggtattccgtggtctcattcttcaccactgtgggatcccatagaagtcaggggatgttcaggaaagcatcacctccagattagagtcaggaggacctttgtcagttaccgcggtgatctgaaccgcaaattaccaacaggatgtgcattataaaggggaaaaggaaaaataattattgggaatactgagattggggtttcacagccacagcctcatcaaccggctgccaggtcgggcagatactgactgaattgctcactgtcgctgggactattagcaaggttcattgaaacctatatacgtgtagcccagtatgcagcatttagactcctagggggctacatacaagtaaactcaatgagttcactaaataagaccacaagacttctttgtcgttggacttctgatgacgcttgggacaatcaaggtgtgtcattgtcaggacacagactagaatgaatgggaattctataagttgacctacatctctgaagatcctgaaaaactttccatttttcctcttggcctcctcaatgttccttctctcccagtaaccattggtagtgagattgaggttgcatatgtttgatgctgtaggaggcagtgaccttcaaggatgtggcagtggtcttcactgaggaggagctggggctgctggaccttgcccagaggaagctgtatcgagatgtgatgctggagaacttcaggaacctgctgtcagtgggtgaggacaggcatcttctataagggaatgtcaggccccaggagtggttttgtatcctagggtgttcaagtttgagtgtgcagtgggaacctaaatttccaataagtgttaccgtgatattatctagaatatgttgggattaagcatgtgacttttcctgtttacagggcatcaaccattccaccgagatactttccactttctaagggaggaaaagttttggatgatggatatagcaacccaaagggaagggaattcaggtaagaagcacgcaactgtgtgtccttgtttgtgacttccatctgttttacttctgtgcacgtccaactccattaccttcttctaaatggccaaacatctttgctggattatgataacctccttccagctagtggccctgctccgtgccttcccactctgacatctgttctcctcatggcagctaaagtgatccttaggacatggatgtcagattgtcattcctcagcttaagagcctttctgtcttcttaattttatgaaagcctctttaagttgcttctagaaacccctgtggtctactcttcatttttcactgcttcttgactacatctcccatactctccctcattctccatcttttctggccaccttgtcatccctcttatttctccatcctgccaaggacactgtatcacctgttgctggtacccaatgaccacgaacttagatgattaaataagaagcatttattatttctctgttctttaggcctgaagtctgacacatctcactgggaaaaaatcaagctgtcttagggctttgttcctttctggatgttcatggggagaaggcttcactttgttttaccagtccctagacactgtccacactccgtggctctagtttccattcctccatctttgaaggcagctacattgcatccttgaccattcttccagagtcatgctccctctgccactcttcttatgcctatgtctttcacctttcaggtcccttgtggttgtattcatcactcctgtatgatccaagttgactttcctactttctgcttagctgattagtgacttcaatgacatctgcagccttaatctgccttgctgtgtaatgtgtcagaatcataggtcctgaaggctggatgtggacatctttcaggaacaattatgttccctaccacagaagcttctgcctcagggccctcacttgcttttctctctgactggagtcctctgttcccacaaaacttactgaccccctctgttagtttatgcaggtgtctgctgagttttaatgtcatggaagaggtcatcttcaagcaccctattgaaaataccatcctatctttacttggcctgcaagtattatgtgtcatatgcttttgtttactgatagatcacctgttccctttcaaatataatctctacaaggtgtttatctgtttgtttatgactgcatcttcagtgcctagaatagtcctagtacatggagggatctgtaaatatttggtatcctgatgaatgaattaatggatggggggacttcactgtctgtaggaatcatggagctagctaataagtaatacatgaaccagagtgtatgaaatatattagtcccttggaagccataggggtttgatttcaggaccccacatggataccgaaagccagagatgttcaagttcctgatatatgtgaagtctttgcctataacctatgtacatcctcccatatactttaaatcatgtctagaccagttataataccaaatgcaatgcctacctgtcacttcattcacaaggattcaacataggactcagtgtgtgagaaattccagttttgctctttggaactggaatttttttccctaaatattttttatgtcctgttggttgaatccatggatgccaaacccatggatatggagggctgattatatattgcagaacagattttttttttctctgtggatggctgcttatccattttcaactttcttaggtttccttgacatgattggttttatgtgtgtgcagttgacccatgtcctgtggaaacttctaagcatagcattttttttttcatgaccacactgagtaatatgccttccctgggacctaccctggagctttccatagggagcatatttatatctgagaagaaagtctttttgaatgaggatttgcagctagctttcctttgagagatttacccatctgcagcccatttgccttttccaaagtcggcccacacttcactgcctccagttcctccttccttcccttagagggggaagaatgaggatgagaggacacaagttatgtagctgaatgttgactctgtttctggtcatctttcttcaaaaatgtgcgtatttcccttttctttacattatgcaaatttaattgtcaaaaagttaaaggacaggctttttgtttatttttatagatttagtgctatattttgaactagtaagctttatgacctggaaggaattggggaattacttactcaaaatagaaacatcctgagaccccttcccatctccttaaagacctcttatttataagtcacagtgtattaaatatatccatgtacctattagacaggattgttcccttgaccatctttgcgggcaggaacttcagggtttgtttcactcagcccaccgctgtcgattccttgcaggagggagtgtgcaagcgagcaagtgcaggaaccggagcaaatgaatgctggaattggctggtcgctcctctctggcgagagcaggctctgttatgcacgccccacagcagtgtccaagcatgttacaacccatgctgtttcagctctgccatctggggatggccaagtgccaatcagctcagtggagcatcagggtagcagcccctgccctcttggcacctgggttcttgtccagcatccaggaagaaccaggtcacatgaactgtgtgaaaggtgatgaacgcagaagactttattgagtggtgagtggttctcagcagaaaaggaggctggaaaggggctgggaaggggatcaacatgttcctgaagccaggccatttgtggctgggcccctctccaaagcagcaccttctgaagttagccacatctatccatactttccgacactcagttgcttctctgctcaccgctcagcgacttgtatccttgccactcagctgcttgtgttgctctgccagctgaaatcttttatggtcacaggatagtggcaggcaggccaaaaaaagcaacattggggcagaaaaatggggtcatctgttttcacttagggctgaggttctaggcttaagggtggagtttggctaggtatactgatgggtacccacttacctattaatattttccaagtttcaacctttggaacttaactctccatcagaaaaatttacctaattcaggacttggtaatatcctgacaaagttttgaacattttgtgagcatgaaccataataagaaacacctctttcagtataacctggacagttttcatgcatgtaggtgtatgtgagtgactttagctgacatttcatgtaacgacacctttcctgcttgtctccacactgtgataattttcattctggctcctttctataaatgtctattgaaggttttaactttatttcagctcactgatgtgtagtcttgaatataaaaacagttaaaaaggcctgtttatctacatcataggctttcttttcattccaagtgattcttcacatcattgattgtctgatgaagagcatcctcctttgtggacctctggaaggacagcctttcagattcccctcagaactgcagttgtctgtctctgtactctttcagataaccaacttatcatccatatcaaaacagaaaaataagattaagtattttatatgtgtcatgcaaaattcttgtataggaatactttcgatttgtagatataaacattctaaggtgtttgatgtttagtatcatgaagggttaaactaaaaagtttaatgggacattttacagagaactgctctcacttcactccaagtgcaaattcggcagtttttcaaaactaccttcacattcaataatttcctagaaagaccctcagaactcactggatgtatttattctcacagttactgatttttacaagcaaaagatgcatattatagttaaccaagggggaaaaaccaaataagacagagtccagtgaagtaccaaatgtggatctcctattgtattctcacagtagagtcgggcatgttacatacccaaaattagcatgtgacttagacacaaggaaccaccaatcagggaaactcaactgagtgctgggatccaagtaattattggggctccattacatagccataattggttggttgattcctgtgtggttatttagtcttttggtccactggttccctgtgacctaaagacctacattaaatcacatcgttattttttctgacatggggaatgccacctgccatttcccatcccccaaagctgtggctagtcacaaccctaaattatattatttcactgtcaagagttacccaagatttgcccccaagcaaacagagagactctcctcaggcatgccccttcaagattctacagattacctctcagatactgaggacaaagtcctgacctctttttagttaggttaactccttttcttatttttaaaaatgttttttaagccatcttaaactgaaaggaaggttaacttctttataaggatatataatatacaggcaaatatacgaagtatttattatgttactgctttcccttagagttccttttgattcatatttcattacgtacataatagtttagtaatttatcatgtaaaatttcagactgagttggaaattttaaaaacagtaacaggttaaatgtatgtgtcatattaattttttattaaaccttttatttctatcaatgattttttatttgaaatgtggtatgtttttttctttcttttcttttttttttttttttttgaggcagagtctcactgtgtcgcccaggctggagtgcagtggcacgatctcggcttgctgcaacctgcgcctcctgggttcaagcaattctcctgcctcagcctcccaagtatctgggattataggtgtgtgccaccacacctagctgatttttgtatttttaatagagacggggtttcactatgttggtcaggctggtcccgaattcctgacctcaagtgatctgcctgcctcagcttcccaaagtgccttggtctcccaaagtgctgggattatgggtgtgagccaccgtccccagtgacatggtatggttttagattactctcatgcaaaccagaaaccagggtgcacttggaaaacacaaactgaacattcgttgaagtttcataccatgtcctaagtgtgaactcttaaaaacactgaacagggcatagcttgtcctgatctcttaattttgtattctgataggaggcaagatccaacctgagatgaagacttttccagaagcaggaccacatgaagggtggtcctgccagcagatctgggaagaaattgcaagtgatttaaccaggcctcaagactctaccataaagagctctcagttctttgaacagggtgatgcccactcccaggttgaggaaggactatctataatgcacacaggacagaaaccttccaattgtgggaagtgtaaacaatccttcagtgatatgtccatctttgatcttcctcagcaaatacgctcagcagagaagtctcattcctgtgatgagtgtggaaaaagcttctgttacatctcagcgcttcatattcatcagagagtccacctgggagagaaactctttaagtgtgacgtgtgtggtaaggaattcagtcagagtttacatctgcaaactcatcagagagtccatactggagagaaacctttcaaatgtgaacaatgtgggagaggcttcagatgtagatcagcacttacagttcattgcaaattacacatgggagagaaacattataattgtgaggcatgtgggagggccttcattcatgatttccagcttcagaaacatcagagaattcacacaggggagaagccattcaaatgtgagatatgtagtgtgagcttccgtcttaggtcaagtcttaataggcattgtgtggtccacacaggaaagaaaccaaacagcactggggaatatggaaaaggcttcattcgtaggctggatttgtgtaagcatcagacgatccacacaggagagaaaccatataattgtaaagaatgtgggaagagcttcagacggtcctcctatcttttgatccatcagcgagtccacactggagaaaagccatacaaatgtgacaagtgtgggaagagctacattactaagtcaggtcttgacttgcaccatagagcccacacaggagagagaccttataactgtgatgactgtgggaagagctttagacaggcctcaagtattttgaatcataagagactccattgccgaaaaaaaccattcaaatgtgaggattgtggaaagaagcttgtataccggtcataccgtaaagaccaacaaaaaaaccacagtggagaaaatccatccaaatgtgaagactgtgggaagcgctacaagaggcgcttgaatcttgatataattttatcattatttttaaatgacacgtaagtgttgtacatatttatggggtacagtgtgatatttaaatatatgtatatgatgtataatgatcaaatcagtgtaattagcacatttatcacctcaattatctcttttttgtgttgagaaaattaaaaattcattgttccagcagtttgaaaataaattgttgtcgatgatagtcacctttagtgctgcagaacagcagaacttcttcctcttatctacctgtacttttgcatccattagccaacctttggccatcccacctatcccttacccttccctgcctctagagccactgttctcactacttctaagaaatcagctttttaagcttccccatgtgattgaggacagtttgaagttagtgtttcagccatagctcagcataccccagtggtcgtgggactgtcagagcagagaatgctgcagggtttctaacagaagtttgacaattagttattattcaggagacaggtcttagtataagagtttgttcacacactttcaaaacactaatgatgaacatgtcaaaattgatgaccactagaatgtcagccacatgtgtctttgtatttttgctgcatccttacattgcttgagtctggaagattgaggctgcactgacctatggtagtgctactgcactccagccagggcaacagagtgagaccctgtctccaaaaaaaaaaattaaataaatacctttctttgtttctagacaagcatctctctgtgtttctggaattttttttttgagtgtacatacatagtgtgttacaattatattcttattttcttcagcagtgaatatttgctggtatttttctattttataattgtatgcattatttttagatttctcagtgaacatcagaaaccccatctctacaagaaatacaataattagccagttgtgttggtgtatgtctgtagtcccagctggagactactggagaggctgaagtgggaggatcgcttcaacccaggaggcagatatatatacaaatggaatagaagtgagagtccataaagaaacccatacatctaaggccacttgattttcaagaaggatccaagattactttatggagacagaatagtctcttcgaccaatactgctgggacacctatacacagacacacaacataatgaagttagattgtacctcaccctacacttaaaagttaactcaaaattcatcagtgacctaatgtaacagctaaactataaaagtattagaagaaaacatagaagtaaatcttcctgactttatttggaatggattcttcaatgaaacaacataagcaaaagcaaatataaatacctaaatgggacctaggttttaaaaaatgctgtgcatacatggacattgtcatgaacatgaaaagaccatacagcatgagttctactatccagattatataaagaattcttacaactcaataacagaaaccactcaattaaaaaaatgggcaaagggctgggtgcagtgtcatgcctgtaattccagcactttgggaggctgaggtgggcagtttacttgaggccaggagttcaagaccagcctggccaacatggtgaaagtctgtctttactaaaaatacaactagctggatgtggtggcctcctgggctcaaaccatccttccacctcagcctcttgagcagctgagactacaggcgtgcaccacagcctctggttaagttttgtatttttttatagagatgaggttcctccatgttgcccaggctggtctcgaactactgcactcaagtaatctgcccacctcagcctcccaaagtgctgggattacaggcatgagccactgcactcagcctaaaaaaaaaaaatcctaatttttatgggtacacatatggagtatatatgttgatacaggcatacaatgcataataatcatatcagggtaaatggggtatctgttaccacaagcatttatcagatttttgtgtgtgttagaaacaatccgtactcgtttagttatttcaaatgtacaataaattattattgactgtaactctgttgtgctatcaaataccagatcttattcattctatctaagcatagttttgtacccactaaccatccccacttccctcaccaccaaccttaactttccctccctctggtaaccaacattctgctctctgtctccatgcattcaattgttttaatttttagctcctacaaataagtgagaagatgtgaagtttgtctttctgtgcctgacttatttcactgaatgtaatgtccttccaattccatccatattgttgcaaataacaaaatctcattctttttgtggctgaatagtactccattgtgtatatgtccatttcctgtatccattcacctgttgatgcatacttaggttgcttccaaattttggttattgtgaatagtgctgcaataaacattgcaggggagggtgcagatatcactttgatatagttttaattttttgaggaacctccatactgttctccgcagtggttctactaatttacattcccaccaacaatgtgcgaggattccctccttcactccttccacatcctcaccaacatttgatattgcctgtcttttgaataaaagctattttaactggagtgggatatctcatggtagttttgatttgtatttatctgatgatctatgatgtagagcaccttttcatatacctgtttgccatttgtatgccctcttttgagaaatgtctattcagatattttgctcattttaaaattgatttattaaattttttcctatttggtttgagcttcttatattctggttattaatcccttgtcagatggatagtttgcaaatattttctcctattgtgtgggttgtctcttcactttgttgattgcttcctttgctgtgcagaagcttcttaacttgacgtgatcccatttgtccatttttgctttggttgtctatgcttttggggtattactcaagaaatctttgcccagaccaatgtcctggaacatttccccaatgttttcttgtagtagtttcatagttcgaggttttagatttaagtctttaatccatttcgattttatttttgtatatggtgaacaacagggttgaagtttcattcttctatatgtggatatcatgtttttctagcaccatttattgaagagactgtccttttcccaatatatatacttagcacctttgttgaaaatgagctcactgtaggtgtagaaatttatttctggattttctagtttacgcagcactaaaaagaatgtactgtacatgaagtgatttctaggatatgttgttacatgaccatagaagagttagaaacgtgctttcttttaagtaataatggaaaataagaaatctacacatactgatacggtttggctgtgtctccacccaaatctcatcttgaattatagctcccataattcccacatatcatgaaagggacctagtaggaggtaattgaatcatgggagtgggtctttcccatgctgttctcgtgatagcaaggacagatagaggagtgactttgaatagaatgggaggcaggtttgccctaagcgatttccagcttgagatttccttagtgattttgggggcccaagatattttcctttcacaatactaagcagtttaatttctcttaaatgtggcatttccacgtctaaagaatattaatatgaaaactttaaaagtgggaagatagcttttccaggagggcaattggccctccatattggcccttgacagggcaggagcatcgccatcttggacaaacactgccattttaaagttcgcgttgatcaaaaactgcctaaatccaaagggcatcagcctaatggctaaggtcagcatgaccataaaccacaaatgacatctccaatcagaaacattccaaccataagataaacccctccctgaccagagacatgccagcaccgagataacctcccttccattggagagatgtcagtcccaagataacttcccctccaaccagagatattccaaccccacaacagacttctccccaatacagaaacattctaagcctgtggtaagctctctctccctaaagccaatacatactcttagtccgtaagagagagcgctcctgactgcaatcggccagaaggccctctcggtttattctccaaaacgaacctgtctttgactgttgagccgcttttcgtgttttttttttttttctctttaactcttacagccctcttaaacacttaaactgtggttgtttttcttgccaaaccagtggtacaacagtgtctggttgtaccaggggctggtgccccactcaatgcctctcccaaaccatttttcctggcccattatttaagctcttagatttagcctcatactattagcgtctagtatattagcctttcagccatctcctgaccgctccacagtcactccccgctaactccttgaagattgtatctccttgctttgttctctttcagtaacactcctgtcatcatgggaggcgtgtagacttcaggaattcctgtctattcaatattttctctcgaggacgcagggagagggaaggaccactctcagggccacagtccatattccaaaccaggcgcttgggtctatgggattcattcctcgtgggcattgcaggaagtgtagtcaaagagcaccgcggagtcccacgcttcccgccggaaggtgatactatagaacgtctcctttgagattcaaggaagtgtagcgcaggagatctgttgaatgacgagcaagtaggctcaggacggcgtatccggggaattctgggaaatgtagttcacacgctgcgcggggtaggggcacttccgctcccggggggcgaggttgctgcagtgcattcggtggtagtttggtgtcagtcctgtgtcttgtcggtccttctaaacgtgtccccttacgatgctggctcgcaaccacctggaagttgactaaggggagaaggagtctcgttggaaaacggaggtttggagggacaacggcctctcttttcgttcttgtcagcggagccttcttggtcttggggctgtcctcgcgtccccgggcatgaggctgggggttgggacttggtcgggacgcgtctcgcctggtttgagggtttttggggctctcagctcgctcagtccgcctccctccatcccacctgtgaggctactttctcacaatttagggttgggatgttattaatctccctgtacctcccactgctgttctttaaaatggggactttaggaccatcctaatgaaatcgttttgggaactggaagaggtaacacaaatgaaagccttaaagcagcccctcccttagtgactggtggtctcttcttagtgtttatttcccacgaagcctgtcaggtccccgggtggggtcagagctccatctgcagggatccccgcccttgtctctgattcctgcaggacgctgggtgatcccggacgcttctgacctctttttaggaaggcgagggttgtttccatttccacgaagggagaggaacatttaacttttatgccggacggcaatgcggtcagggtgtttcacagctttctccttccccagcctgattctcaaaaagagctgcagggagggacttcttggctactgagggcaaagttccacgagagtggtccttggctttttttcttttacagagatgctcaccccgaccaagagtgtaggatgtgtcctcaggcatgggtgttgataataattaagcctcaattggtaactttatcccaagagctttatacaagtagtcacattttcgccacaccgtggctctgtggagaggtactacttttttcagttttaaagatgagtgagatacaaaggagcaggagttatctgagaatagtcacctaagcagtaagaggtggagctgcggttgaaacctgggcgttacaggtcagagccttagttgataatcttttggatacattctcattgaggcagaggaactagctggaatctagtggggaaagcaagctaggacttgattgaagggagccttgagagcaaggcttatgggcttggactgttctgggagtttatcaactatttcattcattagaactatttcatttattacaaatatttcacttgttatgcagcggtatgattgtggagcgttcagaaattggagaaatacgagtagtacaagtttataattacccatgaatccagcatgtaaagatagtaactgttaaacttcgagtgcattttttttttttttttgagacagagtctcactgtgttgcccaggctggagtgcagtggcacgatctcggctcactgctaactccgcctcccaggttcacgccattctcctgcctcagcctcctgtgtgagtagctgggaccacaggcgcccgccaccacgcccggctaatttttttgtagttttagtagagatgaggtt[148 bp omitted]aaacatttaaacaaaattttatgattaaaaaaatgtgttttcccttatgtgtttaactatggaaatttggaaacactgccaagagggaaatagctagtgaacttacatgttatatcatgctcatcctaatttatctcat[142 bp omitted]agaaactccatctctactaaaaatacaaaattagccagacatggtgacgcatgcctgtaatcccagctactcgggaggctgaggcaggagaatcgcttgaacccgggaggcggaggttgcagtgagccaagattgcaccattatactccagcctgggcaacaagagcgaaactgcatcctctgcctcccggtctcaaaaaaaaaaaatatttaacgttttattttcatatcatttgaaacctatagaaaaattgcaaaaatagtgttagaaattctcatatactctttacccaaatttgccaaatgtttacatttttcctgtttgctttgttcttgctgatcacccagataccaccaggaacatacctgtagccagagacagttgcttgtagctttctgcagcaaagaagcccacatttcaagataattgtggggtgtcttggtaagaggtgtttagaaagggctggttatagggtttcacataacatgctagatactattagatattatactggctaggcatggtggcttatgtctgtaattgtagcactttgggaggccgaggcaggtggatcacttgaggccaggagttcaagaccagcctggccaacatggagaaaccccatctctactaaaaatacaaaaattagctgatttgtccactgtgaagttacttttttaaaatttgagggggcgtgcgcctgtaatcccagctattagggaggctgacgcataagaatcatttgaacctgggaggcagaggctgcagtgagctgagatggcgcccctgcactctgatctggatgacagagtgagactctgtctcaaaaaaataattaaatattatattaaataatattgttatctattacatatcacatctgttaaaaagctaataatagtagttgtagtgtcatttattagatagtgttggataccatattacataacgttgttatctaatctgcagcttccatatttaaatttattcagtttcttcttttggtccttataactatcccttgccccactttttacctgtaaccccattcaaagtccaattttatgcattgtctttattgtcacatttctatacttttgtttaatctagaaggattccacagcctttgtcttttatatgcatggttttttgaagagtataggcaagttgttttgcagaaagacattcatttggggtttgtctggtaaatttcatgtttacgtttagagtatgcatgattggcagggataccatagtagtggtgagatgtccttttcattgcaacctaacagtgtccaaatgatgttggtttgtcccttcactggtgatctcaactttgttcacttggccaagatgaagtctttcagatttgtccactgtgaagttactttttttaaattttgaaaataataaagttccttatggggagatacatgattagtggacattctactgtaaagaagagtttccatttctcccccatttattcattccttcattcaactataaatattctattgatatggactcagaattcagtcttactgatttcaatgacatgtagattaacaattattttttccaattctatcaagatgtatttcacatatagctttcacccatttcaggcatggaactccgtgatttttaggaattttgtgaagtggaataaccatgatcatgattcagtttagatcatttttatctcccagttggactccttgtgcccatttatagttaaacctcattctcatctcaaatgtgaagcaaccactaatctactttctctatgatacatttgcctattctgaacatttcatataaatgcgatcacacagtccatgggtttttgtgactgccttctttcatttaacataatgtttccagggttcatgcatgttgtagcatgagtcaatatttcatttctttaaatttccaagtaagatttcattgtatggataggcgacaatttgtccatttacccataggaaggcattttggttgtgtgcaattttgggttattatgaataatgcccctgtgaacattcaagtgctaattcacaacacatgttcatactgttgggtggcatcactgaccaccccttcatgtctctttttttttttttgccttccatggcatgtttcaggcacaattctgtcttctcttgaactgcataactgagaactctgcaaattccccaaagaaggaggaaaaatgaccatgttcaaggtgagtaagtctggtctcttttgctgttcagattctgttttgctacttaagattgtcacatgtttttctcggtcttgggaagactcaaggagaacaacagttatttgtgcacctgttgtgtgccagatgcttccttgtttcttttgtgttgaatttgcgtttggatttgattttgtttacttttaccattatttatgttatgagtagaaatttagtgggaaggaacaattctcccatttcactacatcttttctcactaattaggcatttttattttctcatgctattcctcatgtatattcataactgtatttgtattgatacttatctaatttaaattgtgttctttgtgtttaatattatgtaatattcattatttatggttgcatcatgttcccattgaattgatgctcctttttttttttttttcctcgagacagagccttgctctgttgcccagactggagtgtggtggcgcaatctcggctcactgcaacctccgcctcccgggttcaagcgattctcctgccccagcctctcaagtagctgggattacaggcgctcaccaccacacttggctaatatatgtatttttagtagagacggggtttcaccatgttggccaggctggtcttgaactcccggcctcaagtggtctgcctgcctcagcctcccaaagtgctgggattacaggtgtgcaccactgcacctgccgatgtttctttttaactactttatactcacaggcactaggagctcagttttgaaagagtacttttgacatgtgccacgttggttgttttgtagataaaatatccatatgtggcatggcacagcaggctgtaactgtggcttcacacaaggatttctggagattttcacataggaagagctagcttttgttttccccatgcttaagtcatgcattgtgtgtatgttatttactggtcttttcttattcctttatgtattaaggagtttgaccaaaatgcagcatcctgggctgcacatatatcggtttcggtgaatcttgccagttgctccagcaacatttagcaattcagtctcaactttgtttgataatgcccagggttctcgtacttgaaccctggatgtaatcatttttctgtcttttttttttttttttttttttttagttttttagttttggtagctttagtttcaaatgtccatgatatcagaagattctctagtcactgtgttctattcctttgtttgttcctcagaacagctgaatgatgcagttctcagcctcatcttcctcttaaatatgtgaaatatgagaaacctgctgaggttcagagaggaaacctagggtcggcatgttagctattttgctaaattgaaagagagagagaagaagaaagaggattctccattgaaggacctatgccttctggtatgggtgtctggagtgccctcttgagtgatgacaaccactggtgacatagctcctccctgacccctcctcgggggtcctcttctcttcctgttgtgccacctcctcaggtgcacctagtactccaggcaccaaaggacagtgattgctacactcactatagaaaatctttaaattcctaatggcaaagatggcttatagagtgttaccagggaatataacagcctaaggtgaaaatatttaccactttgatatctaaaaaagacataatccaaaataagaatcttatgtacagaatggagaaaaaaattcaaaggaatatgaataaaggacattaatacattaattggtaaattttagagaagaaatagaagtggccaatacatatttgaaaaggtgatagtattatttatattcaaatacatgggattaataaggtgaattctctctaatgagattatcaaaatcacaggaaatttgataatctgcttttggctattttaagaaaaaccagggtaatatatccccttgaaagattttggagtttgagaaaaaattgagatctgacatatatgatcacaattttaaacattcttattttttgacactttaattttcatttgaaattattgtattatagtttattcttattctttagagacagagttttgctctgttgcctcggatagagtacagtgatgtaagtgtagcccactgcagccttgaacccctggggtccagatcttcctgccccagcctcccaagtagctaggactacgggcacgcaccacgatgcctggctagttttaaaaatttataaagttggtgtcttgctgtgttgcctggtctggtcttgaactcttgaattcaagcaatccccccaccttagcctcttaaagcactgggattacaggtgtgaatcactgcacctggtttgaaattattaaattaaactaaattattattttattttatttcttttttgaaatagagtcttgctgtgttgcccaggctggagtgcagtggcgcaatcttggctcactacaacctccgcctcctgggttcaaacgattcttctgtatcagcctcccaagtgtctgggattatagtcacgtgccaccatgctcggctaatttttgtatattttgtagagacggagttttgctatgttgccaaggctggtctcgaactccagaggtcaaatgatttgcttgtctcggcctccaaaagtgctgggattacaggcatgagccaccatacctggccaaaattattttcaatgatcagacgggagagtaaggtccacatacatgattttctttgcaggattggtattaatgaaaactacataaaattaaatattcattatttagaataaagatagatcatcagttccctgtaatagtatgcagacatgaaatgaaatagataactataatgaaagttataataaaaaatccaaagaaatacgaataaaggacattaccagccaggtgcggtggctcacgcccatattcccagcactttgcggggctgaggtgggcagatcacctgaggtcgggagtttgagaccagcctgaccaacatggagaaaccccatctccaccgggtgtggtggctcatgcctgtaatcccagcactttgggaggccaaggcaggcggatcacgaggtgaggagatcgagaccatcctggctaacatgatgcaaccctgtctctactaaaaatacaaaacattagccgggtgtggtggtgggcgcctgtagtcccagctactcgggaggctgaggcaggagaatggtgtgaacccaggaggcggagcttgcgttagctgagattgcaccactgcactccagcctggggacagagtgagactccatctcaaaaaaaacaaaacaaaacaaaacaaaaaacagcaaaaaaagagaaaccccatctctactaaaaatacaaaactagctgggcatggtggcgcatgcttgtaatcccagctattcaggaggctggggcaggagaattgcttgaactggggaggtggaggttgccgtgagctgagtttgcgccattgcactccagcctgggcaacaagagcgaaactccgtctcaaaaaaaagacaaaaaggtaataaaattaactaatgttaattaaatacctagtctgtgccacagactttccccatttatattctcttgcttattcctggagaaaactgatgtgacagtctttatacagaaaggaaacgaatgcatgtaggcaaacttatccaaggtcacgtggctgggaaggcaaaggcacagagccttgggattgagccttgtgagtgagcacacacactcagtgtgatcataggcacactggctccagatcatgacattcagtgctgcaattaatatatgtagtttgcgtcttgaatacagaggacccactccatggctgtcccacacaggtcactgtaaacttgttagtttggcagatattaaaaaaaaaatgggccgggtgtggtggctcatgcctgtaatcccagcgctttgggaggccgaggccggcaaatcgcctgaggtcgggagttcgtgaccagcctggccaacatggtctctactaaaaatacaaaattagctgggcatggtggcaggtgcctataatcccagctattcaggaggctgaggcaggagaattgcttgaatccaggaggcaggggttgcagtgagctgaaatcgcaccactgcactccagcctgggcgacagagtgagactctgtctcaaaaaataaaaagaaagaaagaaaaatgattacatccagggttcaagtacgagaaccctgggcattgtcaaacaaagttaagactgaattgctaaatgttgctggagcaactggcaagattcattgaaacctatatatgtgcagcccaggatgctgcatttagagtcctagagggttacttacaaggagacttaataagtgcacaaagtaaacctatgggactttttcatcattgcacttctggtggagctctggaaaatcagtgtcattgcgaggatacagacagaatgaatgggaaatctgtatgttgacctacatctttcaagatccacagcaacttctcacccatccccttcacctgctcattgccacccttctcccaggaatcactggtcatgagattgagattgcatacgtttgttgttgtaggaggcagtgaccttcaaggatgtggctgtggtcttcaccgaggaggagctggggctgctggacgtttcccagaggaagctgtatcgagatgtcatgctggagaacttcagaaacctgctatcagtgggtgagcacaggcaccctctgtaatggaacatcaggccccaggaatggctttgtatcctagggtgtttgtgttagtttgttcttatgctgctatgaagaaatacccaagactgggtaatttataaagaaaagacatttcattgactcacagttctgcatggctggtaaagcctcaggaaacttacagtcatggtggaaagccgatgggaagaaaggcacctttttcatattgcagcaggaagaagtgccgagcaaaggggaaaaggccccttataaaaccatcagatagggccgggcgcggtggctcatgcctgtaatcccagcactttgggaggcc[136 bp omitted]aggcggg[135 bp omitted]ataaaaccatcagatctcgtgagaactcatccactatcacgagaacagcatggaggaaactgcccccatgatttaattacctcccaccagctccctcttatgacatgtggggattatgggaactacaattcaagatgagatttggggacaccgccaaaccatatcagtgttcaagttcgagtgtgcagtgagaacctaaatttctagtaaattttacctaagatgtattgggattaagcatgtgactttgttcacagggcatcaactttcccaccgagatacttttcacttccaaagagaagaaaagttttggatcatggagacagcaacccaaagagaagggaattcaggtaagaaccaagcaacgatgcatccttgtacgtgacccttccatctgttttacttctgtccattgcccaactccattgccctggtataaatggccaaacctgtttcctggattcttacctccttcctgctggttgtcctgctcccccaccccctcttcccaccctgacatctgttttcctcatagcagccaaagtgatccttagggaatgtaagtcagattgccattcctcagcttaaaagcctttatggcttcttatttgtgttaatgttacaactgctttaagtgccttttagagacccttgatctgctcttcatcccctactgcctctctgactacatctccattttccagccacgttgtactccctgctgtttctccatcctgccaaggacactgtattgcctgttgctgtcacccagtgaccacacacttagcagattaaacaacaaacaattatctttctgttcttcagatctgaagtctgacacatctcactggacaaaaatcagggtgtccctagggctttgttcctgtctagatgttcttggggagaagccttcactttaatttaccaatccctaggcactgtccacactccttggctcttgtctcccttcctccatcttcaaaagcagctacattgcatctctaaccattcttccatagtcatctgccacccttcttaagcctctgttttccacattttgggtcccttgcgattggattggtcactcctgcataatctagaatgaccttcttactctctctttagctgactagtgaccttaattgcatctgcagccttaatatctcttgctatataacataacaggttcataggtcctgggaattggatgtggacatctttcaaggaccattgttctgtctactacagaagcttctgtcttagagtttatatatgctcttctttctgattggaatactctttcacctcaagaccttctgacccttcctttattctggtctctgttcagttttaatatcatgagaaaggccttctctgaccactctatttaaaataccagccgggcgtggtggctcatgcctgtaatcccagcactttgggaggctgaggcaggcagatagcatgaggccaggagtttgagaccagcctggccagcatggcaaaacctgactctactaaaaatataaaaattagctgggtgtggtagcacagtcctgtaatcccagctactcgggtggctgaggcgtgagaatcacttgaacccaggagccagaggttgtagtgagctgggattgtgccactacactctagcctgggtgacagaatgagactctgtctcaaaaaataaataaagaaatatatatatatatatatatatatagagagagagagagagagagagagagagggaatggaataccatcctatctttacccttctggtgttgtcttatactgtgtcttatatatttctatttagctgtcatctctacccactggaatggaatgtcttaagaggaggacttttagctgttcaatttttattttaagattcagggggtacatgtgcaggtttgttacctgggtatattgtgtgatgctgaggtttgcattgcaaatgatcctgtcacccaggtactgagcatagtacccaatagtggtggcaggataaccctcaggttttaaggctatgtgtaccggtgttagaggtagtggtgatgggctgggtgggccagtcctgaggcccccacatggtgtgtgcaggtgagtgtcagcggtgatggtggcagcaggcttgtaggacctgtcctcaggtcactaggaggagtatacagatgccagtggtggtgatcagggcagggaaatccttaggtctccagacagcatgcttgggcacctgcggcagggttctgggtctgttgtaaagctccctgcatggtacatgctcatgcctggggcaaccaacatggcagggtgatctcaacagccccaggtggtatgcttaggtagtggaggaatgacgccaggccaggtgagcctgtcctcaggcctttcagtggtgcaggcagatgtaggctgtggtggaagaggcggcgtgatccctaggtccccagatggcatgctccagcactggcagcacacaagctgggtctttgtcaggtctcctgtttgtgcacacatgtgcctgaggcaacacagggtagagcaatccccaggtccctctgtgtcatgctctggcactgagatgggcggtaccaagtgaagtgggcttgtcctgtgcacgggcacaggttgtggtgggcagtgcaagggactccccatgcctttaggaggtgtgcttgggtggcagtggcagagtgtgcagagaaactttcctcagaatgagaacacatatgagtgtacagtggccctgctgctgggggtgaggtagcattgccgttagaggcagcagccccagacaggcagctttcaagctctggtgagtgcacacactttgggtccctttgtactgtactgggggcagcctccctggtgtccttcacggcccattccctagagtatgggacactatgtggcctagattgctggggactctgccatactgctgggtctaacaggcattattgtaaccctctgggtggatgtgggggcatgtccatggggcttcagggatttggagatgcaaaggctgttgggccccagggcaagatgcagtctggtgggggtgcagctctcaaaatagcgctgtgccatagctgcttgagtctcaggaagtgtgtgggtcccatcatgagtaccctctctgagtgccattgcatggactccaggtagccccctgtgctagtctcagggcccacaggggtcgagggcctctctcatggctgattgctggagtgcacagcggaaatgtaaaccactagggctctctcacttaccctttcccagcactaggagcctttcccggctttcaggtgatcacggccagaagggctacctcccttcgctctccttttgtgcttcgggtgtttcctgtcacttctctgctgaattccagtgatccctcttagatgctatttgatgtatgagtatctatttgctttttaaattttttagtaataaaatatatagaacacttcatgaatttgcatatcggccttgtgcaggggctgatcattccagttttaccatatgtgctgctgaagtgagcactactcattattttggctctttgtggaggacgcaagctctgggtgtctttagtcagccatcttgaagtcctcctacccttaacgttccttctgattcatcacatatataatttagtagttacataatataccatgcaagattttagactaactaggaaattggtagaaatagtaacacattaactgtattatattaatattttaaattaagtctttcatttctaccacgtatgagacattatgtcattcaaaattggtttcgtgacaacgagagaccgtggtgcacttggaaaacacaaactgtaccttccttgtattcagtaaagtttcaggccatgtcctaagtgaaatcctgaaaacactgaacaaaggtttcacttacccacatctcttaattctgtgtccttataggaggcaagatccaaactgagttggagtctgttccagaaacaggaccacatgaagagtggtcttgccagcaaatctgggaacaaactgcaagtgagttaactagacctcaagactccataagtagctctcagttctccacacaaggtgatgtcccctcccaggttgacgcaggactatctataattcacataggagagacaccttctgagcatgggaagtgtaaaaaattcttcagtgatgtctccatccttgatcttcatcaacaattacactcaggaaagatatcccatacatgtaatgagtacaggaagagattctgttatagctcagctctttgtcttcatcagaaagttcacatgggagagaaacgctataagtgtgatgtgtgtagtaaggcatttagtcagaactcacaactgcaaactcatcagagaatccacactggagagaaaccattcaaatgtgagcagtgtgggaaaagtttcagccgtagatcaggaatgtatgttcattgcaaattacacacaggagaaaaacctcatatttgtgaggaatgtgggaaggccttcattcacaattcccagcttcgggaacatcaaagaatccatactggggagaagccattcaaatgttatatatgtggtaagagcttccatagtagatcaaatcttaataggcattccatggtccacatgcaagagaaatcatttagatgtgatacctgtagtaatagctttggtcagagatcagcacttaatagtcattgcatggaccacacaaaagagaaactatacaaatgtgaagaatgtggaaggagcttcacttgtaggcaagatctttgtaagcatcagatggaccatacaggagacaaaccatataattgtaatgtatgtgggaagggcttcaggtggtcctcatgtctttcaagacatcagcgggtccacaatggagaaacaacattcaagtgcgacggatgtgggaagagattttatatgaattcacagggccattcacatcagagagcctatagagaagaagaactgtataaatgtcagaagtgtgggaagggctacattagtaagtttaatcttgacttgcaccagagggtccacacgggagagagaccttataattgtaaggaatgtggaaagagcttcaggtgggcctcaggtattttgagacataagagactccatactggagaaaaaccattcaaatgtgaagagtgtgggaagaggtttactgagaattcaaaacttcgtttccatcaaagaattcacactggagaaaagccttacaaatgtgaggagtgtggaaagggattcagatgggcctcaactcatctaacccatcaaagactccacagcagagaaaaactattccaatgtgaggattgtgggaagagcagtgagcacagttcatgccttcaagaccaacaaagcgaccacagtggagaaaaaacatccaaatgtgaggactgtgggaagcgctacgagaggcgcttgaatctagatatgattttatcattatttttaaatgatatataattattgtccatatttatgggttacagcatatttcaatacatgtatacaatgtataatgatcaaatcagtgttattagcatatccatcacctcctttatcatttatttgtggatcatttatcatttctttgtgctttgaacgttcaaaaactgctgttctagttatttgaaaataagttattattaattatagtcacctttagtgctgtggaacactagaacttgttcctttcatcatcttactgtactttcatatctgttaacgaatctttcatcatccaccctctctcctacttttcccttctagtaattgctatgccatgctgcttctgcttttttttttttttttttttttttttgagaacagagtcttccaggcttgagtgtagtggcatgatcctttctcactgcagcctccacctcctgggttcaagcgattctcctgcctaaacctcctgagtagcagggattacaggcacgcaccaccacgcccagctaatttttgtacttttttttttttttttttgagacagagtatcgctctgtcgcccagtatggagtgcaatggcttgatctcggctcactgcaacctctgcctcctgggttcaaacgattcttccctgccttggcctcccgagtagctgggactacaggcgcccgccaccacacctgactaattgttgtatgcgtagtagagatggggttttg[142 bp omitted]accacattggccaggctagccttgaactcccaaactcaaatggtccacctgccttggcctcccaaagtgctgggattacaggcatgagccaccgtgcccagccaatgctatgctgcttctatgatgtcaactttttagcttccacatatgtgtgaaaacatgtggtatttatctttctgggcctgaatttacatcactcaacatcatgttctccaaagcttatctttatcttgccataaatgacagaattttattattttttatggttaaatagtgtacctttgtgtatgtatgccacattttctttaccattttctgttgatgaacacttagattggttccatatgttagctattgcaaatagtactataataaatataggagtgcagataggagttcaacacactgatttcctttcctttggatatacagctagtagtgggattgctggatcacttgaatgctgatatgcataagaggatctacactggagaaaaaccatggaagtgtggagattgtggtacatgcttcagtcagggctcacatcttcaaattcagtgtctgttctgtagagaaaccttaataatgtgatatatgtgacagcaaagagttataagatatgaatatgttaattttagtagatacttccgaaaagtatttcaaactggttgtaccactataaactctgaccattattaggcaagaattggctttttttttttttttcttttgagacagtcttgctctgtcacccagactggcatgcagtggaatgatcacggctccctgcagccttgacctcccaggctcaagaaatccttctgcctcagcccctcaaaagctgggactataggcatgcaacaacacgcctggctaaatttttgttgtagagatggggtctcactatgttgcccaaattggtctcaaactcctgggctcaagcgattctccctcctcagccttccaaagtgctgggattacaggcctgagccatgcgcacagcattttgttttgttttgttttgtttttgagatggggtctctcggtgttgcccaggctggattgcttattcacagatgcagttacagtgccctatagcctcgaactcctgggcctaagtgatcctcttgcttcaatcccctgagaagctgggactacaggcatggaccaccacccctgattgatcttctttagtttctataacaaaatagtacactgtttccacaaacttgggaaggctagtatttgggggtggggggcgtggaaatcactaaacaacaaagaaaatctgatgaattggacagcataaaaatattggcataaagatgaacataacataagcaggaatatttaaagcacatactttttatagagtgtctcccctgtaatgtctctggttaaatgaaagggtttcaaatgtgaagacaaccctaaccatactcattatctgtaaaagatgtagcattgtcatggactccttaataaacgtgaagactttaatccatctgaaggtgcatcacatttctgaagtttccaacactgacaaggtgatgggcttatggatgaaaactcatgaatgggaaaaactcagctatcgttaaagcccatatattttattaaagatattggggctgtctcctaaatctagttagtgatgaatttcaagtctagagccatcaccgaatccttgtccacattcattacacataggttttctgagaaaattgtctgctggttatgagaggtcttctcccgtgccaaagtgagtataataaccttgcttttggccaggtgcggtggctcacacctgtaatcccagcgctttgggaggccgaggtgggcagagtgcctgaggtcaggagtttgagactagtctggccaacatggtgaaaacccatcactattaaaaatacaaaacaattagctgggtgtggtggtggcgtgtgcctgtaatcccagctactcaggaggctgaggcaagggaattgcttgaaccagggaggtggaggttgcggtgagccgagatcacgccactgcactccagcctgagtgacagagtgagactccatctcaaaaaaataaaaataaaaataaaagtaaacaagcttgctttcttttatgtgctccttgattttgatggtgatgtgaaatcaaactgaagctgaaaatacaataatcacatttatacagggcatttttcaaggaaatttattgatttttactttaataatttagtgcctcacttttgtaagtctcttgtaagtggccaggcatggtggctcacacctgtaattccagcactttgggaggctgaggcagaaggatcaattgaatctaagagtttgagaccagctttttacagagtgtctcccctataatgtctctggttaaatgaaagattttcaactgtgaagacaaccctaaccatactcatattctagttcctttgcctttccatataaattttagaataattttatatctacaaaatatcttgctggaattttgatagtaattattttaaccctgtgtatcaatttggggagaatgaacatttttgctatattgagtcccacgatcctcaaacatggaatgtgtctccattcatttaatattgttggattttcttcatcagtgtgttgtaattttcatcttacaacccttgtacatcttttgtcaaacttccatctaggtatgaactttgatttccgtgtgttcattgctagtataatatatataaattaattttggtatcctgatcatgtatcctatgatcatgctgaattcgcttattgtctaggcattcatggattggaagacttcacatttttgtgatgacagtactacccaaaccaatctacagttttactgcaatcactatcaaaatccaaacagccttttttttttttgcagaaatcaattcataaattcatatgtaattgtaatggaggcaaatagacaaaatctttcttttttaaaggaacatgatggatggctcccacttcatttcgaaacttactaccaagctatagtaatggaatagaatttagagtccataaagaaactcatacatctaaagtcacttgattttcaagaaggatccaagattgcttaatggagaaagcatagtctcttcagcaaataatgctgggcaaatatatatacatatgcaacataatgaagttagatccgcacttcacactatacttaaaaattaactcaaaatgatcaatgacctaaatataagaggttaagctatacaactcttagaataaaacataaaggttaatcttcaagactttttatttggaatggattcttagataagacaccatatgcacaagctaaaaaaaccccacataaattggactagagcaaaaaaaaaaatgctatgcatacagagacattgtcaagagcatgaattcttctagtatcagaatatataaagaactcttagaccaggtgaggtggctctcacctataatcccagcactttggaaggctgagatgggtggatcacttgagcccaggagtttgaggcctgcctgggcaacatggcgaaaaccatgtctctacaagaaacaaacaaacaaacaaaaaacaacaacaaaaaacaaaggtagccaggcatagtgacccatgcctgtggtcccagctactcaggaggctgaggcagaaggattgtttgagcctgggaggtcaaggctgcagtggggcgtgatgtaccattgcactccagcctgggcaacaaagagagactctgtttcttaaaaagaaaagaaagaaagaactcttacaactcaataacaagaggagaaaccacccaattttctaatgggcaaagatacaaatagaaatttcagatatacaagttaccaacaattatgtgaaaagatgctcaactattagtcattaggaaaatgcaaatcaaaccaataatgagatgccattttacaacagctatgttagctatcatctttaaaaatagaaaatagccgatgtggtggcaggcacctgcagtcccagctacttgggaggctgaagtaggaggatcgcttgagcccaggagttttgaggtgtagtgagctatgcccactgggtgtccacactaagtcgacatcaacatggtgatctcccaggagcagaggactaccaggttgcctcaggagaggtaaactggcccagggtggaaacacagcaggtcagaactcccatgctgatcagtagtgagatgttgtctgtgaatagccactgcaattctgcctgcacaacgcagggagaccccgttttcaatttatacacacacacatatacatatacatatatattttatacatacatatatacaaaataagtattggagaggatgtggagaaattactaccctcacacactgaaggtgggaatgtaaaaatggtgcagttgctgtggaaaattgtttcgtggttcccaacatagaattaccatatgaatcactaaatttcatatctaggtatataccccaaagaattgaaagtaggtgatgaaacaaatacttgtacaccactgtttgtagcaacactattgactacagccaaaaggtggaaagaacccaaatgtccctcaatcaatgaatggataaacaaattgtggcgcaagcctgtaatcccagcactttgggaggctgaggtgggcggatcacctgaggtaaggagttcgagaccagcctgactaacctggtgaaaccctgtctctactaaatacaaaaaaattagctgggtgtggtggcgcatggctgtaatgccagctacttgggaggctgaggcagaagaatcgttttaacccaggaggcgggggttgcagtgagctgagatcgtgccattgcactccagcctgggcatcaagagggaaaccccacctcaaaacaaaacaagacaaagcaaacaaaaaaaacaaatcgtagtagaaacataaaatattatgaagtact[148 bp omitted]cccgtctctactaaaaatacagaaaaattagccaggcgtggtggcacgcgcctgtagtcccagctactcgggaggctgagacaggagaatcgcttgaacccgggaggcggaggttgcagtgagctaagatcgtgccactgcactccagcctggcactttttttgagattccgtctcaaaaaaaaaaaaaagaagcaggatgctaagtgaaaggtgtcagaaacaaaaggttccataatgtataattccatttatatgaaatgtccacaataggtaattcaataggacagagattagtgttagacagtgactgcttagtgggtatggggtttttggggtgatgaaaatgtttcctaactttttatttgtactacatatatcctaaaatggtgaatttcacgttttgtgcattacacctcaatagagatgttttaaataataaaatacattaaaatgttttgcatagataaaacaataaaaaaaaacgtttttgttgagaaaatatttgcgagataaaatgttaatatcatgaatataagaacagtgcttgaaaagtgagggataaaaccaaaaactcaataagaaagtgggcaaaacatctggacaatttacaaaaaatgtaataatgacacctgaaaatatgcaagaatatgccatctttacaagagttataaattaaaactacatgccatttcttaccactggcaaaacttatttgaagagtgtatcatctcgcttgttccctttccagtaacactcctgtcctcactagaggggtttagacttcaggaattcctttctatacggtattttctcttaggcacccagggagagggaaggacgactctcagggtagaagtccacatttcccaacaggcgctcgggggtacgagattcgttccccgtgggaagagtggtcaagggcttcccagtagtcgtcaacacttccctttgagtgtaatgctgcaggagtacagtccagaccctcagtggaatcgcggtcggtttagctccggcagttgggtcccagggaattctgggaagtgtagtccagacgctcagtggagtcgcggtcagtttggctccggctggcgggtcccggggaattctgggaagtggagtccaaacattcggtggagtcgcggacacttccgctcggggactgaggttgctgcagtttttccgcgatagtttggggcagttccgcgcgttgcaggcccttctgaatttcctggacctacgcattggatcctcaaagaactggtgatcgaattaggggaaaaggggcctcgtcggagagtagaggtttggaggggcaagggccgctgtttgcgttctcgtccgtggcaccttcttgggcttgggtctgtcctcgcttcccgggggcattggtacttggttgggtcgcgtctcacctggtttcagggtttccggggctctgagctcgcccactccgccccctgcaccccacgcgcgtggccacttcttctcgatataacgttggggtgttaatctccttgggtttcccgttactgttctttaaaatggggactttagggccatcctaatggaatcgttttgggaactggaagaggtaacacaaatgagagccttaaagcagtccctgtcacttggtgactggtggtctcttgttaatttcccacgaaggaccgggtggggtcagagctccagctgcaggggcctcggcccttctccctgatccctgcaggacgctggatgatcccggaagccttctgacctctttttaggagagcgagggttgcgtccactttcatgaagggaaaggagcatttaacttttatgggggacggcgacgcggtcaaggtgtttcacagctttctcgttccccaacccgacctttccagaagagctgcagggagggacttcttggcttctgagggcaaagctctacgtgagtggtccttggctctttgaccgagatgctcaccccaaccgagagtgtataggttgtgtcctcgggcatgggggtcgataataattaagtcttaattagtaacttcattctaagggctttatacaaataaatttacgccacaccgtggctctgtggagaagtattgcttttttctattttaaaaacgaaagtgagacacagagcgcataggcacccgactagtgagaggtggagctggggttggaacctaagcagtctgggtcagagcctgatttgatcttctcttgggatacgttgtcactgaggcagaggaactagttggacttaggtggggaaagcaagacttaggggcttgaaattttctgagtttctaaaaatgttgtcaactattttgtttcaatcattacaaatattttgtattcttatagaaccatgtcattgtacagcattctatttttctttattaagaacaaaatgggcctggcgcggtggcttacgcctgtaatcccagcactttgggaggtccaggcgggcggatcacgaggtcaggagttcgagaccagcctggccaacatggtgaaaccgcatctctactaaaaaataattacaaaaattagctgggcgtggtggtgggcgcctgtaatcccatctactcgggagggtgaggcaggagaatcgtttgaatctgggaggcggaggttgcagtgagcggagatctgccattgcactccagtctgggcgacagtgcgagactccgtctcaaaaaaaaaaaaaaaagaacaaaatgtttttattacctacgaatccatgaagtaaaggtagcaactgttaagctcgtaatgtgtttctttctttttgtatatttataggtttatttatgaacatttacaaatttttataatttttttcttaatatttcccccttatgtgtttaactatggaaatttccaaatgctgacagactaaactagtgaattatcatgttatatcatactcattaatctcattattgttattatttttcctatgactgtttcctaaaattataaaactttttattttcatgtcatttgaaacctatagaaaagttgcaaaagtagcctaagaaattcttatttactctttacccacgtttgccaagtgtttacatttttcctgtttgttttgttgatgaccatcagctgaataccactagaaacatacctgtaaccagagacagctgattatagctttctgcagcaaggaagcccacgtaccaggggctgtcttggtaagtagaatttaggaagacctagtatatggtttcacataacatattagataatttcagattgtataccagataatgttatttattaaatattagatatctatccaaagactgctaatagtagtttattgtattatctattatacagtgctagataacatattacctaacttcatgttatgtactctgcagttctatatttaaatttgttctatttttcacttaaggttcttacaagtgtcccctacccatctgccaccaccacctgtgttcacagtctaattttatgcattgcctttaattgtcacatttccataatctttaatcttgaggattctacaccctttgtctttctatgcttgatatttttgaagagtataggcaagttattttggagaaaggcattcatttggagttgtgtctgatgtaattcatgtgcgggttcacattatgcattgttggtagggataccacagaagtggtgaattgcgggttcagattatgcattgttggtagggataccacagaagtgctgaaatgtccttttcattgcaacataacagggtccaagtgatgtcagtttgtctcttcattggtgatctcaaccttgtccacttggccgagacgctgtctttcagatttctccactataaagttacttaaaaaaaattgaaaagaataaagtttcttaggaatagataacattattagtgggcattcagctgtaaaatgaccttctccatttattctttgttcaactacaaatattctatcaatatggccttagaattgactcttaagttagataacgtgtacattaacaattattttttccaacctattgtatcatataacttacttatatcaggtgtacatccagtgatcattagacagtttgctgaatggagtaaccatcaccacaattcggtgatcatttcatgctcatattgatttcctcctgcctacttatggttagacttcattctcactcagatctgaagcaatcactaatcagttttctctatgcattttcctacccagacattttatagaaatggaatcctgcaatatgtggtcttttttaactggcttctttcatttagcaataatgtttcaaaggttcatgtatgttgtagcatgagtcagtacttcatttctttaaatttccaagtaagattccattgtatggatagaccatgatttgtctattcatttacccacaggagggcattttggttgtgccgttttgggtttttatgattaatgctgctgtgaacagtcatgtgccaattcacaatacacatccctgttggtgggtggcatccctggccaccttttcatgtctctttttctgcctttcctggcactttgcaggcacaattctgctttcccaggaactgcatcactcaggactctgcaagtttccagaagtaagagggaaaatgaccacgttcaaggtgggtaggacttgcttctattactcttaaaattccctctcagtacttaaattgtcacaagttttcctctgtcttgggaagactcaaggagaaaaacagacatttgaggatctcttgtgtaccatgtacttcctttgttacttttgagtggattttgcatttgtttttactacttgttttcttctatcatttattctatggagtagacaagattgtaggaatggataattatttcattatactacttctctgctcacacattagctatttttatcctgtgatactcttcctcatgtgcattcataactgtatttgtattggtgatgttaatctaatttaaattgcactctttgtatttaatattatataatgttcatttttaatggttgcaccatattcccatttaatcgatgttcctttttaattactttatacttccagacaccaggaactcagttttgaaaggctacttttgatgtgtgccacgttggctgttttgtagatagagtatccatatgtggcacatcatggcaggctgtaactgtggcttcacacaaggattgctggaagtttccacacaggaagagctagattctctttcccccatgcctgagtcatgccttctatgtcttttacttactggcctttctttactcctttatatactaaggaatttgaccaaagtaatatgtaagctaatttttttttttttgagatggagtttcactcttgttgcccaggctggagtgcaatggtgcgatctcggctcactgcagcctctgcctcccaggttcgagggattctcctgtctcagcctcctgagtggctggggttacaggcatgcgtcaccatgcctaattttgtatttttagtagagacagggtttctccatgttggtcaggctggtctcgaactcccgacctcaggtgatccacctgcctcggccttccaaagtgctggaattacaggcgtgagccaccgcgcccagcctaacctaaattttttgtgcatgatactagaaaatttgccagtcacttgtgttttgtttcttcatttactcctcagaacagctgaatgaggctgttcttatcttcctcttaaacacatgaaatatgagaaacctgctcaggttcagacaggagaccaagggtccagaatattagttattttagcctttttactcagttgaaagagagagaaaaagaaagagagaattctccattgagggaactgtgccctgtggtgtgggtgtctggagtgtcctgttgagtgatgatgtccacaggtggcatcgctcctccctggacctaccttgggaggggggcatcttctcttcctgtcgtagtacctcttccatggcccccagcacttcaggcacccaaggacggcaattaccacaattgttatagaacattttaaaattcattatgggaaaagatgccttacacaaaccagaaaatgtaacagtctaaggtgaaaatatttaccatttggatatctaaaacaagatacaatccaaaataagaatcttatgcccagaccagggaagaaaatccaaagaaatacaaataaaggacattaccaggaatgtatagaaggagaaaaacagatgtcaataaatatttgaaaagatggtggtattcatttataatcaaataagtgagaataataaaacaaaatcatggccaggcctgtgactcacacctataatcctggcactttaggaggcttaggaaggaggattgtttgaaaccaggagctcaagaccatcctgggaaacatagcaagactctatctctacaaaaagaaaaaaaagaaaaaaacaatttcttcctaatcagattaccaaagtaatgggaaaattgataacttgcttttggctatgttaagaaaaaccagaataatgtatccccttgaaagattttgaagttaggtaaaaaaaaaaattgagaaaacatgacataatcataatattaaatttctgacattttgttatttaaaacttactttaaataggagagtaagatctacctgaaatgttctttattggattggtaatcatggaaaagatataaaattaaatattcattatttagaataacaatagattagttccatggaacactatgcagacatgagataaaatcgacaataattgacaaaaataaaaatagctaatgtttattaagtattcagtcttgctacacacttttccccagtaacatacgtatattccactgtttaatttgaaaactatatcatgtgacgatcattatatagagaggaaagtaatgcattcaggccaacttgtccaaggtcacatgactgggaagggacagagccttatatatgcgctctgaggcacgctggctgcagatcatgacattcagtgttgcaattaatgtatgtagtttttgcctggagagtatagaggactcactgcataactactcaaacatgtcaccataagcttgtcagtttggcaaatgttgaagaaaaacaataacatccagggttcgagtttgagagaggaagacaatgggcattatcaaacaaagtcaggactgaattgctaaatgttgctgagggtgattgtcaagatttatcaaaacatatatatgtgtagcccaggatgccacatttagagtcctagagggttacttacaagaagactcaatgattgcacgaagtaaaaatacaggaagtctttttcatctttgtgtttctggtggaactcagggaaatcagtcattgtcaggatacagacagaatgagtaggaaatctacgagttgacctatgtctctcaagatccaaaacaacttcccacccctcccctctgtctgctcagtgccacccctctcccaggaatcattggtcatgagactgagattgcatatgtttgatgctataggaggcaatgaccttcaaggacgtggctgtggtcttcactgaggaagagctggggctgctggaccttgctcagaggaagctgtatcgagatgtgatgctggagaacttcaggaacctgctctcagtgggtgaggacaggcaccctctgtaacagaacgtcaggccccagaggtggctttgtatcctagggtacaaagtttcaagtcttaattagtaacttgaacctatggttcaagtttgagtgtgcagtaagaacctaaatttctggtaaactttaccttgatattacctagaatgtgttgggattaagcatgtaagtttgcctgtttgcaggacatcaagcattccacagggatactttccacttcctaagggaagaaaagatttggatgatgaagacagcaatccaaagggaagggaattcaggtaagaatcaagcaactgtgaatccctgtatgtctcttccacctgtttcacttctgtccatgctcaaatccattgccctggcctaaatggccaaacctctttcttggattattgacaaccatcttacacctggtggccctgccacccgccttcacatcctgacatctgttctcatagcagccaaagtgatccttaggaaatgtaagtcagattgccattcctcagctcaaaagcctgtttggcttatttttattaaagttacaacctctttaattgacttttagagaccctgtgatctgctcttcatcccctccctgccacctctctaactacatctcctgtcctctccttcttgctctgtctttaccagccactttattctccctgctgtttctctgtcctcccaagggcactgtgttgccttttgctggtacccagtgaccacagactgagcagactgagagacaaacatttattatttttgtgttctttagggatgaagtctgatacatctcactgggcaattatcaagttgtctgtagggcttcatgttttctggatgctcttggggagaagcctttactttagtttatcagtgtctaggcactgtccatactccttggctcttgcttcccttcctccatcttcaaaggcagcaacttgcatccccatagtcatgctccctctgccactcttcttatgccttcctctttcaccttttgggtcccttgtaattgttttgatcactcctggataatccaggatgatctttctgttctctggttaactgactagcaaccttaattgcatctacaacctctgttcccctgctgtataacaacgtgatcataagtcctggggactggatgtggacatcttttaggaaccattattctgtctctacagaagcttctgtctcagcccttacttgctcatctcagtcactgggatactctgtcacctcaaaaccttctggcatctccttcagttattcaagtttcttttcagttttaaagtcatgagagaagccatcctaaaccactctctttataattccattctattttgattcttcttgtgctctcttgtaccaagtctcacatacttctgtttatctgtcacttctacatgctggactataatgtctaaggaattttaactcttcgtggctgtattttcagtgcctagaatggtcctggtacatggcaggtttccaaatttttgttaacctgatatatgagctaatgaatggggtgacttcactgtctcctgaaattatggagagaactaataagtgaaacacaaactacggtgaaagagagatattgcagaacatgttttttgtcttccaatggccatgtatttaattacaatgttcttagattccgttatttgattgccttgtgtgtttacggtggacccacatcccatggaaacttctaagcattctatttattaccatactgagctatatgccttccatatgacttatcctggagcttttcataggaagcatattcatttctggaaagaaatcatttttgaatgaacattctgatgtctactagtgagacagctcttctacaaggggaaaaaattctccattttgtgatgtgtcagataataaccagcttcccagctagctttcctttgagagatttacccatctgcagcccatttgcctttccaaagtctgcatgcacgtcactgaccccaggtttcttcttctcctgggtggggaagaatgaggaagagagcaacacaattcatgcagctaaacattgcctatatttctggtcatctttgttcaaaaatatgtatatttctgcaccttcattgtatacagatttaattgttaaaaacataaaagaatacagattttacaacataatttttcctttattttttagagacctagtgctctattttcaactttataacttggaaggaatcaggaaactgccctctcaaaatactgacatcctgaaagagactctctcttctccccaaaaacctcttaagtaacagtgtgttaaatatatccatattccagcgtgtaccattgggtacatatttacctattactgtttttccaagattcaaccttggaagttaactttccatttgactgacttaatttaggacttggtaatatcctgaccaaagttgtcaacatttttatgattgtgagtcatagtaagaaacacatctttcaccataaccaggacaaacatttttcatgcatgtagatgtctatgggttacttcagtaggcatttcatgaaatgatacctttcttgcttgtcatgaagatgtgatcatttcttttctagttctttttttctaaatgctcattagaaggttttaaatttattttatagctcactttttgtctatattcttccatttggaaataagtataaaggagtatttatctatatcatatattttctgccctcttttttcttctttttttatttttttgagacagggtctcactctgtcacccatgctggagagcattggcatgatctcagctcacagcaacctctgcctcctgagttcacatgattctcatacctcggcctcccacgtagctgggattataggtgtgcaccaccacacctggctaatttttgtatttttagtagagacagggtttcaccatgttaatcaggctggtcaccaactcctgggctcaagcaatctgcccgccttggcctctcaaagtgctgagattacagacatgagccactgtgcctagcctctggtcttttttattttaatgagagtctaatatccccacatggaaccaacccagggcatgacccctcaggcattctttttatcccaagtgttctcaccacctttcattgtctcatcaggagcatcaccctttctttacccctgtcaggtccaacctttcagattcccatcaaaactggttgtctgtttcttacctatctcagttaaccaaattattgttcacatctacagaaaaataaaattaaagatacatgttatgccaaattcttgtgtaggaatattatgaatatgtagatataaacactcctaggcctttgatattattgtgaagagtttaactggctgcacagtttagagcaagagtttacagaagatcgctctcacttcacaccaactgcaagtgtggggatttcccaaaactaccttcacattcagtaattacctagaaagataagcagaactcactgaatgcttttatactaaaagttacggatatttacagggtagagatgcacattacatttcaccaagagaaaaataagaaacagttctgggaagtaccaaatgaggatcttgtattgtattctccccatagagtaggatgcgttaaattcccagaattaaggtgtgacgtagagggtacagcgaatcagggaagctcacctgagccctgtattttttttttttttgagacggagtctcgctctgtcacccaggctggagtgcagtggcgcaatctcagctcactgcaagctccaactcctgggttcttgccattctcctgcctcagcctcccgagtagctgggactacaggcgcccgccacc[187 bp omitted]gccattatttgttgattgattcccatgtggctagtcagtctcctgggccactgattccatgtaacctaaagcctcaccttaaatcacgttgctctttgtgacatagggggcaccgacccccaaaggcgtggccagctacaaccctaaatcatattgtttcactttccagtgacctagttttactctcaagcaaacaaagacactctcctcaggcataaactcctagacattacctctcagatcctgaggaaaacatctagacctcattttgagtaaggttaatatctttactttgtaaggatacacaatataaacacaaatgtaccaagtcttgattatattacttttgtttaaaattggttttgattcatattttattatatacacaatttattagcttcataatttaccatgcaagattttagactgattaggaaattcactaggaagagtagcaggtataatgtttgtatcatattaattttattattgtcttttatttttattaaaaattttatttcagtagtctttttttattaaagtatatactggtttttggttacatggttgaattgtctaatggtgaagtctgagattttagtgtacccatcacctgagtagtgtacattgtacccaacttgtagctttttatcccttaccctaccttccaccctccccattttgagtctccatagtccattatatcactctgtatgcctttgcatacccatagcttaactcccacttataagtgaaaacacggtatttggttttccattcctgagttacttcacttagaataatagcctccagctccatccaagttgctgcaaaagacattatttcatttttttatggctgaatagtattccctggtgaatatataccatattttctttatccactcattggttgatgggcacttaggttggttccatatctttgaaattgtgaattgtgctgtaataaatataggcatgcaggtgtccttttgatgtaaggacttcttttcctttgggtagatagtagtgggattgctggatcaaatggtagatccacttttagttctttagagaatctccatactgtatttcatagaggttgtactaatttacattcacaccagcagcagtgtataagcgtttcttctcaccacacccatgtcaacatctattgtttttcgtcttttatttctatcaagtattttacatatgatacttggtttagttcgaaattggcctcatccaaaccaaagattatggtgcacttgaaaaatacaaactgaatgttgtctatactcatgagagtttcctgccatggcctaagtgaaatcttgataacactgaacaaaggcttcacttgtcctcatcttttaattctgtattctgataggagacaagatccaaactgagatggagactgtttcagaagcaggaacacatcaagagtggtccttccagcaaatctgggaaaaaattgcaagtgatttaaccaggtctcaagacttgatgataaatagctctcagttctccaaagaaggtgatttcccctgccagactgaggcaggactatctgtaattcacacaagacagaaatcttcccagggcaatggatataaaccatccttcagtgatgtctcccactttgattttcatcaacaattacactcaggagagaaatctcatacgtgtgatgagtgtggaaagaacttttgttacatctcagcccttcgtattcatcagagagtccacatgggagagaaatgctataagtgtgacgtgtgtggtaaggaattcagtcagagttcacatctgcaaactcatcagagagtccacactggagagaaaccgttcaaatgtgtggaatgtgggaaaggcttcagtcgtagatcagcacttaatgttcatcataaattacacacaggagagaaaccttataattgtgaggaatgcgggaaggccttcattcacgattcccagcttcaagaacatcagagaatccatacgggggagaagccattcaaatgtgatatatgtggtaagagcttctgtggtagatcaagacttaataggcattccatggttcacacggcagagaaaccattccgatgtgatacgtgtgataagagctttcgtcagagatcagcacttaatagtcatcgcatgatccacacaggagagaaaccatacaaatgtgaggagtgtggaaaaggctttatttgtaggcgagatctttatacgcatcatatggtccacacgggagaaaagccatataattgtaaagagtgtgggaagagcttcagatgggcctcgtgtcttttgaaacatcagcgagtccacagtggagaaaaaccattcaaatgtgaagaatgtgggaaaggattttacacaaattcacaatgctattcccaccagagatcccatagtggagaaaaaccatacaaatgtgtggagtgtgggaagggctacaaaaggaggttggatcttgactttcaccagcgcgtccatacaggagagaaactgtataattgtaaggaatgtgggaagagctttagtcgggccccatgtcttttgaaacatgagagactccacagtggagaaaaaccattccaatgtgaagagtgtgggaagagatttactcaaaattcacatcttcattcccatcagagagttcacactggagaaaagccatacaaatgtgagaagtgtggaaagggctacaatagtaagtttaatcttgatatgcaccagaaggtccacacaggagagagaccatacaattgtaaggaatgtgggaagagttttggctgggcctcgtgtcttttgaaacatcagagactgcacagtggagaaaaaccattcaaatgtgaagagtgtgggaaaagatttactcagaattcacagcttcattctcatcaaagagtgcacactggagaaaagccatacaaatgtgatgagtgtgggaagggcttcagctggtcctcaactcgtctgacccatcagagacgccacagcagagaaacacctctcaaatgtgagcagcatgggaagaacattgtacagaattcattctctaaagtgcaagaaaaagttcacagtgtagaaaagccatacaaatgtgaggactgtgggaagggctacaacaggcgcttgaatcttgatatgcatcagagggtccacatgggagagaaaacatggaagtgtagggagtgtgatatgtgctttagtcaggcctcaagccttcgacttcatcagaatgttcatgttggagaaaaaccttagtgatgtgatggtgcaataaagtcttcactcagtcttcatgaatgcagtctcatctgaaagttcacaaaggagagacacattaaaatatgaggcacatagtaagcacttccctttgagtattttatctctgaatccatgctggtgataaatttcacccattcttggaagagggaaaacatttgtttaagataacatcagtgcttcagccatagctcagcatgccccagtagtctcaggaccaccataatggagaatccttgtaaatggtgcaataaagcttcattcagaagtttgataattacagctatcattcaggagacaggccttagaaagagtaagagttcatgaatttaccagactaatggtggacatgtccaaattgatgtccactagaatgtaaactacatgtgtctttgctgctaagtcgtcacagccttaacattgattagcactttgtatgtgttcagtacttgtttgttaaatcaatgaaaggataaaacatatgtatggatttggatacaattttgtgtatccaaaaagggaagcctgcaaaaaataattctgggaaacatgagttgaaatgcagagtaaactcagtactgcaatccatagcaatattttgcatattattattttttcttttaaatttttttcttgatcagatttatcatattcattgaacattattttattgcacttggctcctggcttccccccatcctgtgctctgaagtcagagtattatttgtggctctatgaaatgtccattgcttgtatacggtataaatttaattatcttttgtagtttttctcacagtatagactgaaaaggtttggttaattttgcaataacagaccactgcatatttcacaattaagtgttttcaacagtattaaggcaagatttacagtaacacttttaaagtgccagatgtacattgacagaaattttcttagtcaatcctagattgatcatgatttgtgatttctatgcaggccttggtatgattgccttttaattgctgtacaatttcttttttttttttaacttctctggtataaaatattctaaatttgaatgacagcttttgtcaaccttcttatccaatattcttccaccaacgctatgaaacaggaagagaaaatggagtttggtaatttcatcaaatatattcattattgggggcaggagtaacatttaaatcctcctctttattgctggcagtaaaaatatgtcttttggagagcagaacatgccagaatgtataaggtgcaactgtttgatatgaaaaccataggataggaaactatgcctatgacactaaaactccaaaaagtagaagaccacattgatgatgtcactgcattttaaaatggaaagaacaagtgttcaagaacaggaatttgtgtgaattgcatttattcctataataatatgaactcaatgagatgatgacatagacacaataacaaaaggagaaaaacaatgtggctttttttagccttcataacctaatcaaataaatatctttgtgtgttttatgttcttttgagtgtttacatactgtgtaaatgaatatttttactgatctttgctggcaatgagtgtttgcaggcatttttccattttatacttccatgcatttttaatttttttatgccacgatcttttaaacaaccagctcttgtgtgaattaagagtgcgaactcattcattaccatggtggggacaccaatgtttatgaaggatctgcttccatgaccaagcaccttccaatagtcccgacctccaacactggaggtcatacttcaacatgagatttggaggggatacatattcaaactattgtcagatgttaattcatcaggtatacaccatagtaatatcttaagtgtgttaagttaaagtgatatattttctaaggtatagaacaaatagggcttatcacccccctacaagcaaagaaaatgtcacaatgcttagtgtgccatttttgatattggatgcaacttattgtttcgattgtgctactctgacttttatgagtgacccaaaaactttgacttgtcccagacaagagaagtttgtgtaatatgtcccagcttccacgtaagcttctctgccactaaaaccctgtgaccccgggggtccaaaagtgtttgaaatgtccgtggcagatagtatgtttgaagcctatggttggccctaattggagaatcaaaattcagatgcttagtattttgaagcaaatttctgccatcctctgcatatacttactctcctctggagaagaagcttttcattttgctagggtgttttgttttgttttgtttttgtttttgttttttgagacgagtcttgctctgtggcccaagctagagtgcagtggtgcaatcttggctcactgcaacctctgcctcccggtttcaagcgattctcctgcctca[134 bp omitted]gcctcccaaagtgctgggattacaggtgtgagccaccacgcccggccactaggggtcttaaaacggacagaacacttgaccacagaccaccaaattaacatgtgacttatgctttccatcatgaatcgggtgttgacccctgcacctttttaagttacatgtgcagattagtattccatttggaagtggtatatatgagattgtgtttgtgcaggctctgaagccacaggtaagtgcacctaatattcatctccctactcttgctgtattcagaatgagtgaatataaagagaagtcatctgaaattattgtgtctcagcagcagaaagaagtggaatacacggttggacgcggtggctcacgcctgtgatcccagcattttgggaggccgaggcgggtgaatcacctgaggtcgggagtttgagaccagcctgaccagcatggagaaaccccctctctactaaaaatacaaaattagccgggcgtggtggcacatgcttgtaatcccagctacgctggaggctgaggcaggagaatcgcttgaacgcgggaggcgaaactccctctcaaaacaaaaaacaaacaaaaaacaaccaaaactgaaagctggtaatgaaacaaatacgtatacacgaacatttgtagcaacactgttcactacagccaaaaggtgaaaagaagccaaatgtgcgtcaatgtatgaatggagaaacaaattgtagtataaacataaaatattcatctatgaaaaggaatgaagtactgatacgtggtatgatgtgaataacattaaaaatattatgctaagcaaagggagttagaaacaaaatgttccattcatttttatgatttgtccaaaataggtaatagaaaagagagaaagattcatgtttccccaggaatgggattatggacaacagtagtgattgcttagtgggcatggggttttctttgggtgataaaaatgttttgtaattcaagaggtggtggtttcacaatgaagcagctactttgtctgaggtttaaacccggggttcgtcgttaagcgccagaaaaatttaggacacggacacacaaaaactcctcagtttaggagcggaggtttaataggaagaagagaaagagaaacgggttcctccatagaggaaggggtctccgagcggaaaagggtcggctggcagtgaatgtgctgagttttacagaccagtttgaggaggcagtgtctgatttacataggggtcatagattggttcgatcagttatgacgtttacatagtgcgtggggaaggctggtcgccccaccctaatcttcttatgcaaataggcttcccagttgattggcccatcttgccagcttcttactgtgcacgtggctgacaaagagaagggaagatggagccgccatctttaacatgattggcacaactgctggtatctatgtctgcggcagctggattttacaggctgctcttccttaggaagggaaataatttggggctgcttttcattaaaaagaaaagccttaccgagggctcccataccctatctgcctaagtgatggcttcttaactcgtatatattaacaacactgtattcgtactagatgccattgccattgaattatgtgccttaaaataattttgttttgtgaattacacctcaaaaatattttttaaataataaaacgaccacgttaaaaacgttttgcatagcgaaaaacaagtcaaaggaaaaaagctttttggttgagcaatatttgatacaatgttaatatgagtatgtaaataatacttaacggaggggaaaaaactaaacactcaatagaaatgtgggcaaactatttgaccaattcacaaagactataatagtggcaacggaaaatatgcacggatgttccactttatttacaaaagaacaaatacaaattaaaactacatttagaaaccatttcttaccattagattagcaaaacttaactcctcgaagactgtgtcttctcgcttgttccctttccaataacactcctgttatcattggaggcgtttagacttcagaaattcctgtctattcagtattttctgtcctggaccagggagagagaaggacgactctcaggataacagttcacattccccactaggcaggcgctcgtggctttgggattcgttcccagtgggcacctcggagtggcaacgcttccccctgaagaatgagattttgagcgtttttccttcagcattcggaggagtgtaatccaaatgctctgtggagtcgtacacactggctccagaaggaggatacaagcaattctgggaatggtagtccagacgctcagtggagtagcggtcagcttggctccggcaggcgaatcaggggatttctgggaaatgtagtccagacgctcagtggagtctcggtcaatttgactccggcaggtggatcccagggaattctgggaagtgtagtccagacgctcggggtcgtcgcggtcagtttgtctcaggaattctgggaagtggagtccagacactcagtggagtagcgggccacttccgctccgttactgtgaggttgctgcagttttgtccctggtagtttgggtcagttccgcgagacccttctgaatttcctggacctacgcattggatccttaacgaactggtgatcgaattaggggaaaagaaacctcgtcggagagcagaggtttggcggagcggggccgctgttttcgttctcgtcagtggagccttcttgggcttggggctctcctcgcgtccccggggtgtttgggacttggtcgggtcgcgtctcgcctggttttagggtctccggggctctgagctcgcccactcggcctccctgcaccccacgcgcgtggccacttcctcgcgataaaacgctgggatgttacttaatctccttgggtctcccgttacagttctttaagatggggagtttaggaccatcctaatagaatcgttttgggaactgaaagcggtaacacaaatgagagccttaaagcagcccctgtcacttggtgactggtggtctcttgttaatttcccacgaagcctgtcaggtccccgggtggggtgaaactccagctgcaggggcaccggcccttctccctgattcctgcaagacgctgggtgatcccggacgccttctgacctctcttttaggaaggcgagggttgcatccacttccaggaggggagaggagcatttaacttttatggggcacggcgaccacggtcagagtgtttcacagccttctccttacccagcccgacctttccaaaagagctgcagggagggacttcttggcttctgagggcaaagctctacgtgagtgatccttggcttttttctttgacagagatgctcaccccaaccgagagtgtataggatgtgtcttcgggcatgggtgttgctttcagttgtcatgtttttctagtctttaatcttgaaagatagcatagctttcatcgttttttcttggtattttatccttgttatttttgaagagtatagatgaagttattttggtcaaagatgttcatttggagtttttctgatgtatttcacgtttaacttcaaaatatgcattttttgctggaataccacagaagtggtaaatctctctctctctttttttttcttgagacggagtttcgctcttgtcgcccaggctgtagtgcatggcacgatctcagctcattgcaacatccacctcctgggttcaagctattctcctgcctcagcctcccaagtagctgggattacaggtgcctgccaccacatccggctaatttttgtatttttagtagagaagggatttcaccatgttggccaggctggtctcagactcctgacctcaggtgattcaaccgccttggcctcccaaagtgtgggattacaggcatgagccaccgtgcccagcctgaagtggtaaatttcttattgcaacataacaggggccatatgtcagtttgtcacttcattggtgatctcaactttgttcacttggctaaagtcatgtttgtcagatttccgcattgtaaaattattttgaatttttttttttaccccaggaacacagattcaagttgctctcaatatacactccctaattttttagttaaataaaattttgtaaggagaaatacatttattagtgcacattctactgtaaaggtgaactctcccttctccttcatttgcttattcattcattcaactataaatattctatcagtgtagatccagaatccagtcttattaagttaaatgacatgtggatgaacaattaccaatgctttgtccaactttattgaggtgtattctacatatcatagaaactacccatttcgtgtgtacactttaatgatttttaggaactttgtggagtggaataaacatcaccataattcagtttaaataattttcatcccccattaagcctccttgtgctcacttatagttaatcctctttgtcacctcaaatatgcagagaccacctatctactttctcgttatatacacttgcctactctggaatttcatagatataggatcatgcaatatgtgggccttcctatgtgactggcttctttcacttagcataatgtttccaaagttcatgcgtgttgtagcatgaatcagtacttcattccttttaatttccaaataagattccattgtatggataggccacaatttgtctatccatgtacgcataggagggagtttgttggtgtgcagttttgggttactatgaatgatgctgttgggaacattcatgtgttaatttacaatacacattcgtgttggtggatggcatccctggccacactttcatgtctctttttctgccttccctggtactttccaggcaggattctgctttcccttggactgtatcactcaggactctgaatattccctgaaataggaggaaaaatgaccacgttgaaggtgagtagagcttgcctctcttgctgttaaaatttcttttatggagacttgttctgtcgccaaggctggagtgcagtggcctgattttggctcattgcaacctccacctccggagttcaagtgattctcctgcttc[131 bp omitted]ccttagcctcccaaagtgctggaattgcagatgtgagccaccgtgcccggccgtatttcttctcactactcatattctcacaggttcttctcagtcttgggaagacttagggagtacaacagagatatagcatgggacaaacagaatctagctcttcccgtgtgaacacctccaataatccttgtgtgaagcagcagttaagcagttatagcctgttgtgttgtgccaacacgagagccagcgtccacaggtggcactgctcctcccaggcaccattttggggtgatcttctttcttcctgacatgacacctactcagatgcacccagtgctccaggcacccaaggacagtgataaccatagtcatgatagaaaatctttactttcagtatggtaaagggtacctcacacaatgttaccagaaaatataacagcctagagcaaaaatattcactacttgtatatttgaaacagataaaatccaaaataagaatcttatgtacagaatagaaaaagaaaatccaaaggaatgtgaataaaagacattaacaggcaagtttaaaaggagaaattgagatggccaataaatatttgaaaaggtgatggtattatttataatcaaataagtgagactgttaaattcttcctaatatgattacaaaaatcatgggaaaattgataacctgctcttggttatggtaagacaaatcagtgtacacgtatcctcttgaaagattagggtttggtaaaaaattgagacctgatattatatgatcacaattttaaatatgcctatttattgacattttaattttcatttaaaattattttaaataaacagtagtaaaatctacccaaaatgtttttttttacaggattggtattaatgagcatatataaaattaaagattatttagagtagataaaaatagattatcaattctttggaatactatgcagacatgaaatgagataaaatagatggcaacaatgacaataataataaaaaaaattttaaaaagctagtgtttattaggtatttagtctgcactgatcaactttcccaatgctgcatgtatttccttgtttaatcattgaaaaaactataatatgaaaattattagagagggagtaaataggtgaacttgtccaaggtcatgtgaccaggaaggcacagagccttgggatgtgcttttaggcacactgtctgcagatcatagatcaatgctgcaatcaatgtatgtagtttatgccttgagagtacacaggatgtactgtatagctgtcccacacaggttaccacaagctttgttagtttggtggcagatattaaagaaaaatgataacattcagggttcaagtatgagagagaacaatgggaattatcaggcaagactgggactgaattgttaaatgttactggggcagttggcaagattcactgaaacctatatacgtgcagcccaggatgctgcatttagagtcctacagggttacttacaaggagactcagtaagtgcacaaagtaaacctacaggaggtcttttccatcactgcacttctggtggagctcaggaaaatccatcattatcaggata[133 bp omitted]gaaaccccatctctattaaaaatacaaaaattagccaggcatggtggcaggcacctgtaatcccagctacttgggaggctgaggcgggaggatcacttgaacctgggaatcggaggttgcagtgagccaagatcatgccactgcactccagcccgggcaacagagcaagactgtctcaaaataaataaataaataaaataaaataataaaaaaggaagtctgtgtgttgacctatgtctctcaagatccaaaacagcttctcattcctcccctctgtctgctcagtgccacccctctctcagtagtcattggtcatgagactgaggttgcatatgttcgatgctgtaggaggcagtgaccttcaaggacgtggctgtggtcttcactgaggaagagctgaggctgctggaccttgcccagaggaaactgtaccgagaagtgatgctggagaacttcaggaacctgctctcagtgggtgaggacaggcaccctttgtaagggaacatcaggaccaggagtggctttgtatcctagagtgttcaagtttgagtatgcattgggaacctaagtttccagtaaattttacttagatttttttctaggatatattggcactaagcacatgacttttcacgttcacagggcatcaatcactccacagagatactttccacttcctaaaggaagaaaagttttggatgatggagacagcaacccaaagagaagggaatttaggtaagaagcaagcaactctgtgtccttgtgcgtgactctcccatcggtttcacttctgtccattgcccagctctgttgtcctggtctaaatggccagacctctttcctgaattattacagctgactttcggctggtttccctgctcccacttttcccaccctgacatctgttttcctcatggcagccaatgtattccttaggaaagtcagactgccattcctcggctcaaaagcctttctggcttcttttttttttttttgagatggagtctcgctgtgtcgcccaggctggagtgcagtggtgcaatctcggctcactgcaagctccgcttcccgggttcacgccattctcctgcctc[224 bp omitted]tttagagaccatgtgatctgcttttcatcccccaccacctctctgactacatctcctgtcctctcccttttgccttgtccttccagccacgttgtcctccctaccgtttctctgacctgccaaggacactgtattgcctgttgtagtaaccaatgaccacacatttagtcgactaaacaacaaaaatttatcatctttctgttctttaggcctgaagtctgacacgtctcaccggacaattatcaagctgtctgtaggtgtttgtttctttctggatgctcttgaggagaagcctttattttggtttaccagtctctaggcattccttggctcttgtttcccttcctccatcttcaaaggcagctactttgcatttctgacccttcttccatagtcatgctcactctgccactcttcttatgcctctctctcctgcctttcaggttccttgtaattgtgttggttacccctggatgattcacaatgacctctctttcttgttagctgattagtgaccttaattgcatctgcaatcccagtcccccttgctgtgtaatataacatgttcataggtcttgggtactggatgtggacatcttttatgaatcattgttctgtctactactgaagcttctgcctcagagcccttacttgcttttctgtctgatcagaatactctttcacctcaaaactttctggcttctcctttaagcatattcaagtctctgttcagttttagagaggccatttccaaccaccctatttaaaatactattctaggccaggcgcggtagctcacgcctgtaatcccactactttcggagaccaaggtgggtggatcactgagatcaggagtttgagaccagcctggccaacatggtgaaatcccatctctactaaaaatacaaaatttgccaggcgtggtagtgtgtgcctgtagtctcagttactcgggaggctgaggcaggagaatcacttgaacccaggaagcggaggttgcagtgagccgagatggcgccaccgcactccagccttggtgacaaagtaagactctgtctcaaaaaaacaaacaaaacactgttctatttttttcttcttgtgctgtcttgcactgtgtcttatatatttctgtttacctgtcacttttacccccaggaatgtgatgtctaagaggatgaattttagctgttttgctcatggctgtctattcacaggctagaaggtattgttctggtacatggcaggtatctaattatttgttatcctgataaataaattaatggatgaggggaacttcagtgtctccaggaatcatggagatagatagctaataagtgatacacaaactagagtgaatgagagctattgcagaacatgtttctgtcttttgatggctgcctatctaattagaactttcttaggattccttgttgggatactatttttaggtatgtgcagttcacctacatcccatggaaacttctaagtgttctttttatggccacactgagtattatgccttctctctgacttgtcttggagctttatgtttttatttttattttttaaaaattttccacaagttattggggtataggtgatatttggttacataagttctttagcgacttgtgagaatttggtgcgctcatcacccgagcagtatatgctgcaccatatttgtagtcttttgtctctcgccctcctcccactctttcccgcaagtccccaaagtccatttctctcttttttttttttaagcagagtctcgctctgttgcccaggctggagtgcagtggtgccatctcggctcactgcaggctccgcctcccaggttcacgccattctcctgcctcagcctctcaagtagctgggactacaggcgcccgccacg[175 bp omitted]tcagtgagaatatatgatgtttggttttccattcctgagttacttcacttagaataatagtctccagtctcatccaggttgctgcaaatgctattaattcattcctttttatggctgagtagtattccattgtatataataccacagttttctttattcactcgttgattgatgggcatttgtgttggttccacgattttgcaattttgaattgtgctgctgtaaacatgcatgtgcaagtatctttttcgtgtaatgacttcttttcctctggatagatacccagtagtgggattgctggatcaaatggtagttctacttttagttctttaaggaatttccacattgttttccatagtggctgtactagtttacattcccaccagcagtgcagaagtgttccctgaacaacacatccatgccaacatctactgtttttttgatttttgattatggtcattcttgcaggagtaaggtggtatcgcattgtggttttgatttgcatttccctgatcattagtgattttgagctttttaaaatatgtttgttggccatctatatcttcttttgaaaattgtctattcatgttcttagcccactttttgatggggttgtttggtttttttcttactgatttgtttgagtttgttgtagattctggatattagtcctttgtcagatgtacagattgtaaagatattctcccactctgtgggttgtctgtttattctggtgactgttccttttgctgtgcaaaagctctttagtttaattaggtcccaattatttatctttgtttttattgcatttgtttttgggttcttgatcatgaaatccttgcctaagccaatgtctagaaggatttttccaatgttaccttctagaatttttatagtttcaggtcttagatttgagtccttaatctatcttgaattgatttttgtataaggtgagggatgaagatccagtttcattctcctacatgtggctagccaattatcccagcatcatttgttgaaaagggtgtcctttcccccactttatgtttttgtttgctttgtcgaagatcaattggctgtaaggatttgggtttatttctgggttctctattctgttcctttggtctatgtgcctatttttataccagtaccatgctgttttggtgactatggtcttatagtatagtttgaaatcagttagtgtgatgcctccagatttgttctttttgctttagtcttgctttggctctgcgagctcttttttggttccgtatgaattttagcattttttttctaattctatgaagaatgatggtgatgttttgatagggattgcatttaatttgtagattgcttttagcagtatggtcattttcacaatattgattgcacccatccatgagcatgagatgtgtttccatttgtttgtgtcatgtatgatttctttcagcagcattctgtagttttccttgtagaggtcttttgactccttggttaggtgtattcctgagtatttgattttttttgcaactattataataggggttgggttcttgatttgattctctgcttggttgctggtggtgtgtagaagagctactgatttgtgtacattaatcttgtatccagaaactttgctgaattcttttatcagttccaggagctttctggaggagtctttaggattttcaatgtagatgatcatatcattagcgaacagtgacagtttgacttcctctttaccgatttgggtgccccttatttctttctcttgtctgattgctctggctaggacttccagtactatgttgaggagtggtgagagcagatgttcttgtcttgttccagttctcagagggaatgctttcaacttttccctattcagtgttatgtttgctgtgggtttgtcatagatggcttttattacattgaggtatgtcccttgtatgccgattttgtgagttttaatcataaagcgttgctggattttgtcagatgctttttctacatctattgagatgatcaagtgattttcatttttaattctgtttatgtggtgtatcacatttattgacttgggtatgttaaaccatccctgcatccctggcatgaaacccatttgatcatgatggattatctttttgatatgttgttggattaagttacctagtattttgttaaggattttagcatcaatgttcatcaaggatatcggtctgtagttttcttttttgattatgttctttcctggttttggtattagggtgatgctggtttcctaggatgaattaggaagggttccttctttctctatcttgtgaaatagcgtcaaaagaattggtatcaattcttctttgagtgtctggtggaattctgctgggaatccatctggtcctggactttttttgtttgtaatttttaaattaccatttcaatctcatggcttgttattggtctgttcaggatatctaatttttcctgatttaagccaggagggttgcatttttccaggaatttatccacctcttccaggttttctagtttatgtgtgtaaaggtgttcacagtagcctagaatgatcttttgtattgcagtggtgtcagttgtaatatctcctgtttcatttcttagtgaggttatttggattttctcgcttattttcttgggtaatcttgctaatggcctatcaattttatttatcttttcaaagaaccagctttttgtttcatttatcttttgtattttttgttttgttttgttttgttttgttttgtttcaatttcatttatttctgctctgatcttggttctttcctttcttctgctgggtttgggtttggtttgttcttgtttctctagttccttgaggtgtgatcttagaatgtaagtttgtgctctttcagtctttttgatgtaggcatttagggctatgaactttcctcttagcaccatcttagctgtatcccagaggttttcatgggttgtgtcattattgtctttcagtttgaataattttttaatttctatcttgatttcatttttgacccaatggtcattcaggagcagattatttaatttccatgtatttgcatggttttgaaggttcctcttggagttgatttccagttttattccactgtggtctgagagagtgcttgatataatttcagttttcttaaattaattgaggctcgttttatggcctatcatatggtctctcttggagaaagttccatatgctgttgaataggatgtgtattctgtggttattggatgaaatgttctgtatatatctgttaagtccatttgttgcaagacatagtttaaattctttgtttctttgttgactttctttcttgatgacctgtctgatgctgtcagtggggtattgaagtcccccactattattgtgttgctgtctaccacatttcttaggtctattagtaattgttttataaatttgggagttccagtgttaggtgcatatatgtttaggattatgatattttcctgttggacaaggccttttacattatataatgtccctctttgtctcttttaactgctgttgctttaaagtttgttttgtctgatatcagaatagctacccctgctcatttttggtgtccatttgcataaaatgccttttccacccttttactttaagtttatatgactccttacatgttaggtgagtcacctgaaggcagcagatggttggttggtgagctcatatccattctgcagttctgtatcttttaagtggagcatttaggccatttacattcaatgttagtattgagatgtgaggtgccgttgcattcatcttgctatttgttgcctgtgtactttggtttttgtatttttttgtttttgctttttaatatgtgtttttgttgtataggtcctgtgtgatttatgctttaaagaggttctgttttgatgtgtttccaggatttgtttcaagatttagagctccttttagcagttcttgtagtggtggcttggtagtggcaaattctgtcagcgtttgtctgaaaaagactgtatcttccattcatatatgatgcttagttttggtggatacaaaattcttggctgataattgttttgtttaaggaggctgaagatagggccccaatctcttctagcttgtagggtttctgttgaggaatctgctgttaatctgataggttttcctttataggttacctggtgcttctgtctcacagctcttaagattctttccttcgtcttaactttggataacctgatgacaatgtgcctaggcaatgatctttttgcaattaatttccaaagtgttctttgtgcttcttgtatttggttgtctaggtgtctagcaaggctgggcaagttttcctcgattatttccccaaatatgttttccaagcttttagaattctcttcttcctcaggaacactgattattcttaggtttggtcctttaacataatcccatacttctttgaggctttgtttatattttcttattcttttttctttgtctttgttggattgggttaattcgaagaacttgtcttcaagctctgaatttctttcttctacttgttcaattctattgctgagactttccagagcattttgcatttctataagtgtgtccagtgtttcctgaattttttatttttttttatttaagctatctatttccttgaatatttctcccttcacttattgtatcattttttggatttccttgtgctgggcttcacctttctctggtgcctccctgattagcttaataactaacctcctgaattccttttcaggtaaatcagggatttcttcttggtttggatccattgctggtgaactagtgtgatattttggtggatgttaaagtgccttgttttgtcatattaccagagttggttttctggttccttctcatttgggtaggctctgtcagaggtaaggtctagggctgaaggctgttgttcagattcttttgtcccacagggtgttcccttgatgtagtactctcccccttttcctatggatgtggcctcctgtgagccaaactgccgtgattgttgtctctattctgggtttagctacccagcaagtctacccagctctgggctggtactgggggctgtctgcacagagtcctgtgatatgaactgtctgtgggtctctcaaccatagatatcagcgcctgttccagtggaggtggtgggggtgtgcaatggactccgtgaggtttcttagctttggtggtttaatgctttatttttgtgctggttggtctccctctaggaggtggcactttccagagagcatcagctgtggtagtatggagaggagccagaggtggatgaggccctagaactcccaagattatatgccctttgtcttcagctaccagggtgggtagggaaggaccatcagggagggggagggctaggtgtgtctgagctcagactctccttgggtgggtcttgctgtggctgctgtaggggatgtgggtgaggttcccaggttactggagttgtgtacctaggaggattatggctgcctctgctgagtcatgcaaattgtctgggaagtaggggaaagctggcagtcataggcctcacccagctcccatgcaaaccaaagggccggtctcactcccaccatgcccccactaacagccctgagtctgtttccaggcagtgggcaagctgggcttgagaccttgccccaggctaccacctctcagctgcaaaagaaaagggcttgggtcttcccctgcctgtgagtctgcacactggattcacaccctcccccaagttctggccaggaggcttcttgcctggttcaaactgttataaagttcagctggatacttctttctccttgtggagttccccaccccctgctcctctggctgccttcctgatggatccctgtgatgccaggcaagaatggcctgcttagggacccaacgaggtcccaaggcctttctgttgctttgtctacccctgtatcttactcagctctctaaattgactcagctccaggtaaggtcggaaacttctcccacaaacagaccttcagtttctccagtgagggtgtgtgttcagtagaggaggctttttctcacttccacagttggggcactcacagtatttggggtgtctccagggtcctgcaggagcagtccacttccttcagagggtctgtgggtcctcttgggattgctagtttgtttttgcagttgatctggaggtaaaattcgcaatgggagactctgtatgccgcactgtccgtctgagttggagctgcaatctagtcctgccttccgtccgccatgatgatcttgtcttggagctttttgtagggagaatattcatccgtggaaagaaaccttttattttatttttctttctttattttattttattttattttttgagacggagtctgcctctgtcacacagactggagtgcagtggtgccatgtcggctcactgtagcctccgtgtcccgggttcaagtgattctcctgcctcagcctcccaagtagctggtatatgccaccatgcccagctaatttttttgtattttttagtagagacagagtttcaccatgttggccaagctggtctcaaatacctgacttcaggtgatctgcccacctcggcctcccaaagtgctgggattgcagggaatgagccaccactcctagccaaaaaaaaccttttcaaaggaagattctgatgtctccttctgaaacagctctcctatacaaggggaaaaaactttcaattctctgatgtctcagaaaataaccagctttccagctacctttccttcgagagatttacccatctgcagcctgtttgcctcttccaatgtacatcaccaatgtacatgtacatcaccaacccccggtttctctttccttctcctagagaaagaagaatgaggataagggtgacacaagtcacacatctgaatgttgcctgtatttctagtcatctttgtttgatagcgtggtatatatttctgcatctttattttttacaaatttgttaaacatgttaaagaatacagatttcgtacagtcttccttttctttgtatagagacatggtgctgtattttgaactggtgaactttatatcctggaaggaatcaggaaactgccctctcaaaatgttaacatcctgaaagagactcctccttcttcccaaaaatctcttatttataagggatgatgttttaattatatccatgtactaatgtgcaccagtaggtacacacttacttactaatgtttcctaagattcagccattgaaaattaactttccatttgattgatttacttaattcagaatgtggtaatatcctgaccaagattttcaatgttttatgaccatgagccatagtaagaaatacatctttcatcatcaccaggatgaaaatattttgtgcatgtagatgtgtatgagtacctttagtaggcatttcatataatggcacctttcctgtttgtcacgatgctatgataatttctattctggttctttttcctaaatgctttttagaaggtttcagatttattttacagctcactaagagtctgtagtgtttattttgaaaatgggtataaaggtctgtttctttacatcatattttttctgctatctgttttcaatgagacagtccaataacttcacatggaaccaatcagggcatgaccccttaggcgttcttttcatcccaggtgatcttaccaactttcattgtctcatcaggatcatccccctttgtgtatttctgtcaggtccagcctttcagattcccatcaaaactgaaggtttctgatccttttctatttcaggtaaccaagttattgttcatatcagtacagacaaatgagattatacatgttctgcaaaaattcttgtacaggaatactctgaaaatgtagacataaatactcctaggtatttgatatttagtattgtgaagagcttaaccaattgcaaagtttaaagtgacagctcacagaagactgctgtcactgcataccaatgacaaattcagtggtttccccaaattattttcatgttccatattcttaaaattatgggtttttataggggaaagatgcatattacaattaggagaaaaatcaagtaagacagagtccagggaagtatcaaatgagaactttttattgtactctccccatgaaatcaggatgcattacatccccaagattaaggtgtgacattagacgggaggagagcctatcagggaagctttcctgagccctggtattcagagtaatcgttgtctgttaattacatagccattattggttgatttctttcccgtatgagtagtctcagtctcctggttgactgattccacatgacctaaagcctcaccataaatcacattgttggtctttctcacatagtgagcaccacattctcctcataggtgtggccacccataatcctaaatcgtagaattacaccgtccagagtgacttactagacctactacctccaggcaaacaaagacactctcctagggcatgacattttaaggactgagagattgcctctcagatgctgaggacatcacccaggcctctttgtgacttaggataatttctttacttcataaggatatacaatacaaactaaaatatacaaagttttgacgatgttatggcttctccttaaagttcacatttgattcatatttcactgtttacataatttattagttacataatttaccatgcaaggttttatttctaccaagtatttcacatatgacacgtggtgtggttctgaattggtctcatgcaaaccagagtccatagtgtacctggaaaacacattggctgggcacagtggctcaagcctgtaatcccagcactttgggaggccaaaatgggagtatcacttgtggccaggagttcaagaccagccttggcaacatagcaagaccttgtctctacaaaaagtgtaaaaattagctagttatggtggtatgtgcctgtagtcctagctactcaggaggcagaggtgggaggatcacttgagcccaggaggtcaaggctgcagcgagccatgattgtgtccctgcactccagcctgggtgacagagggagacactctctttaaaaaaggaaaatacagggctggg[138 bp omitted]gtggcgggcgcctatagtcccagctactgaggaggctgaggcgggagaatggtgtgaacaacccaggaggtggagcttgcagtgagcggagatcacgccactgcactccagcctgggggacagagcgagactccatctcaaaaaaaaaaaaaaaaaaaaaaaaggaaaatacaatctgaacattccctatatttattaaaatttcaggctatgtcctaagtatgaaatcttgataacactgaataaaagctttacttgcccacatctcttaattctgtgtcattataggaggcaagatccaaatggagatggagactgtttcagaatcaggaacacatgaaggcttgttcagtcatcaaacctgggaacaaatttcaagtgacttaaccaggtttcaagactccatggtaaacagctttcagttctccaaacaagatgatatgccctgccaggttgatgcaggactatctataattcacgtaagacagaaaccttctgagggtaggacgtgtaaaaagtcctttagtgatgtctccgtccttgatcttcatcaacaactacagtcaagagagaagtctcatacatgtgatgaatgtggaaagagtttctgttatagctcagctcttcgtattcatcagagagttcacatgggggagaaactctataattgtgatgtgtgtggtaaggaattcaatcagagctcacatctgcaaattcatcagagaatccacactggagagaaaccattcaaatgtgagcagtgtgggaaaggctttagtcgtagatcaggactttatgttcatcgtaaattacacacaggagtgaaacctcatatttgtgagaaatgtgggaaggccttcattcatgattcccagcttcaggaacatcaaagaatccatactggggagaagccattcaaatgtgatatatgttgtaagagcttccgtagtagagcaaatcttaataggcattccatggttcacatgcgagagaaaccattcagatgtgatacatgtggtaagagctttggtctgaaatcagcacttaatagtcatcgcatggtccacacaggagagaaacggtacaaatgtgaggaatgtggaaaacgcttcatttataggcaagatctttataagcatcagatagaccacacaggggagaagccatataattgtaaagaatgtggaaagagcttcagatgggcctcaggtctttcaagacatgtgcgagtccacagtggagagacaacattcaaatgtgaagaatgtgggaagggattttatacaaattcacaacgttattctcaccagagagcgcacagtggagaaaagccatatagatgtgaggagtgtgggaagggctacaaaaggaggttggatcttgactttcatcagagggtccacagaggagagaaaccctataattgtaaggaatgtgggaagagctttggctgggcctcgtgtcttttgaatcatcagagaatccacagtggagaaaaaccatttaaatgtgaagaatgtgggaaaagatttactcagaattcacaactttatacccatcgtagagtccacagtggagaaaaaccattcaaatgtgaagagtgtgggaaaagatttactcagaattcacaactttattctcatcgcagagtccacactggagtaaagccatacaaatgtgaagagtgtgggaagggcttcaacagtaagtttaatcttgacatgcaccagagggtccacaccggagagagaccttataattgtaaagaatgtgggaagagctttagccgggcctcaagtattttgaatcataagagactccatggtgatgaaaagccattcaaatgtgaagagtgtgggaagagatttactgagaattcacagcttcattcccatcagagggttcacactggggaaaagccatacaaatgtgagaagtgtggaaagagcttcagatgggcctcaactcatctaacccatcagagactccacagtagagaaaaactacttcaatgtgaggactgtgggaagagcattgtgcacagttcatgccttaaagaccaacaaagagaccaaagtggagagaaaacatctaaatgtgaggactgtgggaagcgctacaagaggcgcttgaatcttgatacgcttttgtcattatttttaaatgacacataactgttgtactcatttatggggtacagtgtgatagttaatgcaagtatacaatgtgtaatgatcaaatcagtgtaattaacatacctatcacctcaaacatttatcatttatttatgttgggaacccttaaaattcactgtcctagctatttgaaaataatacgttgttaattactgtcaccctgtagtggtgtaaaacactagaacttattcctcctacctgcctgtatttctgtattcattaaccaacctttggctaccaccctgcctcctcacctctaagaactactattctactctctacttctatgaagttaactttttgagcttccacatatgtgtgagaacatgtggtatgtatctttctgtgcctggcatatatcacttaatataatgccctgtaagtctcattcactttgctgtgagtgatagaattttgttgtttttcatggctaaatagtactctgatgtgtatatttgccccattttctttattcattcatccagtggacacttaggttgattacataccttggcctatttcttggctatcgtgaatggtgctgcaataaacatgggggggtggagataacactttaacatactgatttccttttctttggatatgtaccaagtatcatataatagtatgacatgactcaaaattaaggaataagattgtggaaattggttttcaaaaaaaaattctctagtttgaatatagagaaaaattggtgagtgtcttcagctgtcctcatacataatgcatgtgagctcgctttaagcataagtgaaggagtggaaaaatcctggagatagaaatcaaggggtatacatgtggatgtaaaaaatcaacaaagattcttttaagaaaaggtgtgtatgggtagggaacaatagcatgacagcagtgcggcctctaacagtctggaaccagttaggacaaagagcaggattgagcgccattccattcatagacaccgtggtgatattttgagtacattaggttaaaaggctttcttcagcaaaatctatctctagagatagatttgatttttataatcaaatctactagagatagatttgatttttataatcaaatctaccagagatagatttgatttttataatcaaatctactagagatagatttgatttttataatcaaatctactagagatagatttgatttttatacttaatgttctagactgtatcttttcaggatgctaggtactttatgaagatccatgctgtctcaatttgcatagtgggttggaggtccctaagacaatctctccagattctatgatttgctaagaggactcagaatatagttgtactcatgactatattatagtgacaggatacaaataatcagcaaagggaaaaggttcttgtataatatctggagggaatcagatgtaaatttgtaaagatcctttgtgcatggagtaacaggtctcaattcctccagtattgaattgtgactgtacttgtgaaatgtctacaatggaaattaattatcaacccgtaccaaaggttcttattggaactaatcatgtaggtaccatccctctggtacatatcaagattctagactccaagaaggggagcaagtgttcagaataacttgaaccatgcctaccagttatggaatggtggcaaccctctcaaactccgtgtttcctaacaccagctaaaggccagtcttataagcagtcctttctaagatttgcagtctcaggcctgttatattaactttttgtgcacatagtactagaaaactgttggctcagtcttctttttgttttgtgtgttttggtttttaactgtcaccgataccagaatagctcatctccaaggtaactgtaacagaacactcagcagattaaacagaaaatacttgcttattataattattaaaagtttggtagggtctatgtctgctctctggtgtgtcctggatcatcaacttggttacaacatggtgttaacatgtgggactgattgtgtttcttgttaatatttctgtttctcccaaccacgctgaatattaaatacctagttctatatctagtaccctgagcttatgtggggctaatattctttgccatttttcaccacagatttgatttcctttttcttttgtggacactggtgagttccctaatataactttgacttggttatattttcacaatcggtggggattattacagattatcatccttcctctgcatttgaaaaaggagggaggcttcaagtcaggttagttgaccttcctttgttggtcttattatccataacataataaataaattgatgaggatgggcatggtggctcacgcttgtaattccagcatttagggaggctgaggcggcgttttagaccagcctagccaatgtggtgaaacctcatctctactaaaaatacaaaaaatatgccaggtgtggtggtgtgcgcctgcaatcctagctactcaggaggctgaggcaggagaatcgcttgagcctaggaggcggaagtttgcagtgagccagaatcgtgccactgtactcctgcctgggtgatacagtgagtctccatctcaaaaaaataagtttatgagaagtctattaaattgttacataatctatataggtagaaggtttctatttcaagtgaaccaaagtgtaacttgaatcgtctaatgcagactcacagcccaaaaataaattccaagacatgtccactttacaaatccacaattcctttgatggggtgggagggcagttctggataaggatggaccctgctagattgcaaaaaatttacagcactaattttttccccagagatctccataaggacctatggtcatgaacttctgtgactgtgtactcaaaaagagaaataatcacacattttggcagtgactgaattcttgttttcaagtaggataaatccaaagagactcacactgagacacattataatcaaaaagacaaggaacatcttgaaagcagcagcatgaaagtgacttgtcatgtacaagagatcctcaataatatcatcaatggctctggccaggtacagtggctcatgcctataatcgcagcactttgggaggctgaagcaggtggatcacttgaggtcaggagtttgagaccagcctagccaacacggtgaaaccctgtgtgtactaaaactacaaaaattagccaggcgtggtggtgtacacctatagtgccagctactcaggaggctgagacaggagaatcacttgaacctggaaggcagagattgcagtgagccgagatcatgccactgcactccagcctgggtgacagagggagactgtctcaaaaaagaaaaaaaaaaaaaaaaaaagatcatcagtggatttctcagcaaacctccaaggccagatgatgtattaaagtgctggaaaaaaacctggtatattgaggattctatattcagcaaaactatacttccaaaatgagagatcaattaataacttttcagaaaaacaaaagctgagagaattgccagtagacaagttattcaagaattgaaaaggttgggaggctgaggcaggcagatcatttgaggccaggagtttgagaccagcatggccaacatggtgaaaccctgtctttactaaaaatataaaaattagccgggcgtggtcgtgggcgcctgtaatcccagctacacaggaggctgaggcaggagaattgcttgaacctgggaggtggaggttgcactgagccgagattgtgccactgcactccagcctgggcaacacagtgagactccatctcaaaaaaaaaaattgataaagggaatcaatccttcaagttgaaatgaaaggattttagacaataacttgaaatcatatgaaaatataaagatctatactaaaggcaattgcatgaagcaatacaaacaacattatgatagtaattttagtttgtaatcccagtttttattttccatacaacgtaaaagacaaatgcataaaaatgactaccaatctatgtaaataagtacacgatatgtaaagatgtactatgagatcagtaacagtgcgggaaggaaagagctgtgaaggagtagggtttttatatctgattgaagttaagttggtatcaatttaaaagactgttataactttaggatgttacatatacttttggtgactataaagaaaatatcaatgaaacatgcacaaaagaaaataagaagtgattcaaggcaaggcagggtggctcatgcccgtaatcccagcactttgggaggccaaggcgggtagatcatgaggtcaagagattgagaccatcctggccaacatggtgaaatcccatctctgctaaaaatacaaaaaaaattagttggggatggtggcacgtgcctgtagtcccagctactcgggaggttgaggcaggagaattgcttgaacccgggaggtggagatcttgtagtaagctgagattgtgccactgcactccagtctgggcgacatagtgagacaacatctcaaaaaaaaaaaaaagtgattcaaaattaatcactacaaaaaaagaactcaacacaaaggacaattgtaatgaaggaaatgagaggcaaaaacacaataggacatataaaaaacaaatttaaaatggtagtccttacctatgtataattagtttaagtgaaattaatgaaactccccaataaaaagatgtagtttgtcaaaatgattgaaagacaatatgtaattatatgctctgcacattagaattaatgacatgcataggtgaaaggcaaatgatggaaaaagatatcccatgtaaaaaaaataacagcacaggtagctatactaacagataaattagattttaagtcaaaaactgttaaacgagacattaaatattgctaaaaggttcatttcactaagatgaaacagttataaacatatgtgcaccaaatatcagagttccaaaatataaaatgtaaatactgacagaattgaagggagaaatatacagctctccaataatagtaagagactccctacctttctttcaaatgcataggacacccagacaaaagataaataaggaaacagataatttgaagaacattatacaccaattcaacctgagagacattgacataactctccgccccccaacagaatacacattttctcaactgcacatgaaacattcttcaagacagaccatatattaggccacaaaacaagtcttgataaatgtaaaagtttgacaccataaaaatatattttccaactacagtctagatcataataactagacatcaatagcagtataaaaagtgaaaaaagcctgaggcgagaggatcacttaagtctagaagtttgagaccagcctgagcaacatggtgagactctgtctctaccaaaaaaacaaaaaacaaaaaggctgggccgaggtgggcagatcacttgaggtcaggagttcaagaccagcctggccaacatggtgaaaccccggctctactaaaaatataaaattattcgggcgtggtggtgcatgcctataatcccagctacttgggaggctaaggcaggagaatctcttgaacctgggaggcagaggttgcagtgagccgagatcacgtcattgcactccagcctgggcaacaagagggaaactccgtctcaaaaaaaaaaaagtatatatttgctagttttgtcagctgagagggtcaagaataaaaaacactaaggtagcagcgatcatacctagcactcagttctttgtttctaactacattttccacaaataggaaccagaagtcctaggagaaatatctgatctcatggctagggtagggaaaatacccaatgaacttgaaaaatacctaatgaacttggaacacacagtatcagaaagtaaaccagtgcacaaagagctcatatcatgatgaacaggaggagccagaaggcaagaggggactgcttgaagaggattttactggcaaaatctgagacaaccagagaatcaaaatacataataacagtagtagatgtgaactcattaatataacaagaattcacaaatccacactggtataaacaaataaataatatagatggaaagctttttcttagagcataatgccaaaaaatcaacatagaatgagttggagtatctcagtttttcaccagatagtagtaactttttaggggaaaaataattttagagtgcagaattctggagagaaaccccttaatcaactgttcaagtttagcagcaccagtaatggataaaaactagtatctggtatatcctgagatcatgcactaaggacagaaattgatcataatccagaaagacataatcttgaatgttggaatcgctgaagatcaaaatgttaaaaatataaccctggaaaaaataattttaaattttttagaagatattgactgatttacatttctttcttttcttcctttttttttttgtttttttttctgagacagagtctcgctctgtcactcagctggagtgcatttcccttccttcctccctcccttccactttttttttttttttctgagacagtgtctcgttctgtcacccagattggagtgcagtggcgtgatctcggcctcccaggttcaagtgattcttgtacctcagcctcctgagtagctgggattacaggcatgtatcaccatgccacgcccagctgattttttgtatttttagtggagacagtgtttcactatgttggccaggctggtctcaaactcctggcctcaagtaatccgctggccttggcatcccaaagtactgggtttacaagcgtgagccactgcgcctggccgagatggagcatctcaataaattttgtcatttggaagggccgactagagcaacaatacagctgtaactagtatagaaatagcagtcagtcaattttcaaagagggggatgtgtggcattgtgtggttagcatagtaaccttgtttttatgtaaacacaattgtgaaaaggtatttttttagtttataaaatgaatctagaatgtgagacttcattttttaaaaaacaaaaatatagattgataagtgtattagtccattcccccattgctataaagaaatacgtgagtctgggtaatttataaagaggtttcattggctcacacagagtcctgcagcctgtaaaggaaacatggcagcatcagctcagcttctggggaggcctcaggaaacttacaaccatgctgcaaggcgactagggagccagcacttcacatggccagagtaggaggaaaagagcgaggagtgagatgctacacaattttaaacaagcagatctcatgagaactctatcaggagaacagcactagagggatggtgctaaaccattagaaacctccccggtgatccaatcgcctcccaccaggccccaactccaacactggggattacatttcaacatgagatttgggtggggacacagatctaaaccatatcaataggccaatgtatgtttatggggagaaaaaaatctggttatctttttttttttttttttttccgtgacagagtcttgctctgtcgcccaggctggagtgcagtggcatgatctcggctcactgcaacctctgcctctcaggttcaagcgattctcctacctcagtctcccgagtagctggaattacaggcacgcaccaccatgcccggctaatttttgtattcttagtagatatgggttttcaccatgtt[139 bp omitted]ttgctttattctattatttatttgtatcaaccaatgtaagccagattccaaattgctaactataatgacgatattttaaccaaaaaatataaaggaagaaaataaaatatgttccttcacgtataggatcctccttaatgctactgcattaaataaatcataggcattgggtgtctgacatcaatgccaagcgcttcaccagttatacttgctttgaagtattgggcaatttaagagcttctctgaaatttggtgtttttacctcttcagtagacataataccatgaaaagtgtaaacgaaagaagatagcttttccatgaggacagggcttccccactggccctctcaaatgatgattgtttttcctgccaaaccagtggtaccacagcgtctggagtaggggctggcaccttctttgttcttcattgcctctcccaaaccattgtacttgctcactcttccaacttttagttttggcctcatattatcagtttatagtaatcaatcatcaatcatctactgacccctaaaaagtcattccccatttagtccttgaagattgtatctcctcgcttgttctctttccaataatcctccgtagtcctgggaggcgtttagacttcaggaattgctgtctattcaatattttcgctcaaggactcaggcagagggaaggacgactctcagggtcacagtccacattccctaccaagcgctcagcgatataggattcgttccccatgggcagtgcgggaatcgtaggcaaggagcaccgcggagtcccatcgcttttccctgaagggtgagattctgaacgtttttccctcagcattctgagtgtaatccaaacgctcagtggagtcgtggtccatttgacccacgcagggggatccggggaattctgggaaatgtagtcccgccaatcagtggagtcgcgggcacttccgctccagggaagagggggcgattgtcacggcacattccacggtagtttcttccagttccgcgactcgcgggcccctcctaatgtcagggacttaagattggggctcgctgggacctggtggtccggttatgggaaaagaagcctcgtgggagagcagaggtttggtggggcgagggcggcggcttttgttgtgtcagcggagccttcttgggctggggctcccctcgtgtcccgcggcgggaggcggggggcattgggacttggttgggtcgcgtctcgcctggtttgagggtttccggggctctgagctcgcccactccgcctccctgcactccaggcgcgcagtcacttttttacagtgcaaggttggcgtgttaatctccctgggcctctccttgctgttctttaaaatggggacgttaggaccatctttgtagaatcgttttggtaactggaataggttacacaacacaaacagtccctgtcacttggtgagtggtggtttcttgttactttcccacgaaacctgttaggtcccccggtggggtcagagctccagcagcaggggcctcagcccttatctctgatccctgcaggacgctggacgatcccggacgccttctgacctctttttaggcaggcgagggttgcgtccacttccacgaagggaggggagcatttaacttttctcagggacagcgacccagtcaggatgtttcacagctttctccttccccagcctgaaaaaggactgcgcggactgacttcttggctactgaaagcaaagctccacgtgagtgtgacttgtcatttttcttttacagagactgtatctttgtagcatgtgtaatagggcatgggcatttataataattaagccttaattgctaacttcaattctaggggatttatacaattagatacgtttaagccgcaacgtgactctgtggagaggtactggtcatccaagtagtaagaggtgaaacttgggttggaacctaggcattcagggtcagagcccgagttgatcatctcttggatatattctcattgaggcagaggaactagctgtactcaggtggggaaagtaagttagaacttgattaaaggaccttaagagcaaggctaattgccttggagttttctcagtttttaaaaactgtcaactattttgtttcatttattacaaatatttcacattctaatagaaccgtatcactgtgaagcattcagaaattacagaaatacgaagatacaaaaattgtaattacctatgaaatcaggatgtaaagatagtaatggttaaatttctaatgcattttgttttagtggttccatgtttatattacttataaatgttttacaaaatttttattatacatttctcaatgtttttctatttatctgcttatccatggaaatttccagataaagagataataaactagtgacctgccatattctatcatgctcattcttattcttctcattattatttctcctatgactatttcctgattttttaaaaaaactttaacacagtaattatataattttaagtctatagaaaagttgcaaaaatagtataagagggcagggcatggtgggtcatgcctgagtcctgagttatggaactgaggcactcagggtcacagcccgagtaatcccagcactttgggaggccaaggcctgtggatcacttgaggccagg[224 bp omitted]gaggcaagagaatggtgttaacccgggaggcggagcttgcagtgagccgagattgcgccattgcaccccagcctgggcaacagcgcaagactctgtctcagaaaaagaaaaaaaaaaaaaaaagaaaacccgtctctactaaagatacaaaaattagccacatgtggtagtgcgcgcctgtaatcccagctactctggtggctgaggcatgagaatcgcttgaacccaggaggagaaggttgcagtgagccaagattgcaccactgctctccagcctgggcaacaagagcaaaactctgtctcaaataaattaaaataaaataaaattaatttttatgagtagatatacttgttagtgggcaacatactgtaaagaccagcatcccctgttcccctgtttgcttattcattcattcaaaagtaaatattctatcaatatggactcagaacgcagtcttgttaaattaaatgacatgtagattaataatttttttccaactttattgaggtgtattttatgtatcagaattcacccatttcaagtgtacaattcagtaatctttaggaactttgctgagtgtagtaatcatcatcatcatttagtttagatcattttcatcccccaattggactcctcttgcccatttacagttaatccccattcttatcctaaatccccatcaacaagtaacctactttctttataaacatttgtctgttctgaacgtttcatatacatgaaatcatacaatctgtggtttggtgtgcctggcttctttcactcagcatagtgtttccaaggttcatgcatgttgtagcatgagtcagtacttcattcctcttaatttccaaataagattccattgtatggatatgccaggatttgtctatccatttttccataggagggcattttggttgtgtgcagtttgggattattatgaataatgccaccgtgaccattcgtgtgctaattcacagtacacatctgtgttggtggggacatccctggccacgctttcatgtctctttttgtgtcttccatagtgttccaggcacgattctgccttctctcaaatggcataactcaggactctgcaaattcccagaaacaggaggaaaaatgaccacattcaaggtgaataaggcttgccactcttgctgttaaaattccatctcactattctcatgtttcctgaggaagactcaagaacaacgggcatttgagaacctgtttatgctaagtgcatccttctgccttttgagttgactttgtttttagatgttgtttattttattatttcagttgaccttctgtatctgtgggtttcacatctaggggttttgcgtctttgaattttgcatttgtggattcaaccaaccacagattgaaacctgagtctatgtaaagctgaccatacatattttccttttgcggttgattgagtctgtggatgtggaacccatggatgtggagggctgactgtagtacaaacactattttagataagggacttgagcatccacaaattatggtatcctcaggggtccttgaaccaattccccaagcgtattgagcgacaactgtatttattttatggagtagaaaaattggtgtgaatgaacagttctcctactttacttctctgcttacgtattagctgtttttattttcttatagtcttttcctaatgtgcattcataactatattggtattcatgatatatatctcatttttgttattttttccttaagtactaaataatgttcattttttgaggttatgccatatacccatttaattaatgtgcctttttatttttgactacttcccattcatggacatttaggtgatttaagaattttattgttttacataacactgcaatgacaattttcctacataaccgtttcctcaaaaatcaattctgaaaactttctgctgatttttttgtcaccacaacctctgccttctgggttcaagcaattctcctgcctcagcctcccgagaagctgggattacaggcatgtgccaccatgcccagctaattttgtatttttagtagagatgggactcctccatgttagtcaggctagtctcgaactcctaacctcagatgatccacctgccttggcctcccaaagtgccgggattacaggcatgagccacagtgactggctgtagatagaatactctaacatggcacagcacaacaggctataatgctgcttcacacaaataatattgttggagttttcatataggaagagctagattctgtgtgctttgtgcctcgatcatactttgtatgtattttatttactagtgtcttattgcctttataaagtaaccagtttgaccaaagtagtaggtaataaccttcatttaaaatgtccagtgacacggaagatttgccagtcacttgtgttctgttactgtatttattcagaacagcagaatgaggaggtttgtggtctcttcttcctcttaaacaggtgaaatatgagaaaccttctcagattggcatagaaagtcaggggtcagaaacattagccattccatttaagtgaaagtgagagacaaaaggaaacaaatatttctcaatgaatgacccgtggtgtgggtgtctggagtgccctgttgggtgataacgtccacaggtagtgggggacctcttgtgttcctaatgtggtggcacctcagatgcactaagatgctcagcactccaggtgcacaaggacagtgattagcacagtggttatataaagtctttaaattactctacggatatccccctcagatagtggtttctcgggtatatacccagtaatgagatggctgggtcaaatggtatttctagttctagatccctgaggaatcgccacactgtcttccacagtggttaaactagtttacagccatcattctactgtcaattctactaataagtggttcattcaacctctgcaccctcattacaacacaagaacatctctgaggagtaccctgaagcatggggatcagggggtgaggtttttggtaagtgttttagtgggtgtgacaaaagataccttacagagtattaagagaaaaacaagttggggcaaaaatatttaccacacaggtgccaaaaaagatgaaattcataataaacattggtattcatttataatcaagtaagtaagaataatagaattgttcttcctaattagattatcaaaaccattggaaaatttataacctgctt[137 bp omitted]acctatgcctcccgggttcaagtgattcttctgcctcagcctcctgagtagctgggactacaggcacgcaccaccatgcctggctaatttttgtatttttagtagagatggggtt[133 bp omitted]aggcaggaaaaaaggaagaaaatctgccattatgtggtcataatttttaatgtgctttttttctgatgttttattttttatttgcagttatttagtttaatttatttttttgggacggggtctcactctgtaacccagactagagtacagtggtgtgatcatcgctcaccacaaccttgattacctgggctcaagcaattctctcgcctcagcctcctgagtacctgggaccacaggcacacgccaccacatgcagctaattttttgtactttttgtagagacagggtctcaccatgttgcccaggctggtcttgaactcctgggctcaagcaatcctccatccttggcctcccaaagtgctgggattacaggtgtgagcgactgtgcatggcctgcaatcattttaaatacacacgaaggtaagatctgacagtcgggtgactcatgcctgtaatcccagaactttgggaggccaaggcaggcggatcacctgagatcaggagttcgtgaccagcctgaccaacatggtgaaatcccatctttactaaaaatacaaaattagctgagcatggtggcgcatgcctataatcccagctactcgggaggctgaggcaggagaataatttgaacccaggaggcagaggttgcagtgagccaagattgtgccattgcactccagcctgggcaacaagagtgaagctctgtctcaaaaaaaagaaaaaaaaaaggaaagaaagtaagatctacatgaaatgatgttctttgctggattggttataatgaaaacaatattgaaaattaaatattcattaattagaacaggtagatgcagatttcagttccctcgaataatatacagtcatgaaatgaggtgaaatagatgatgatggtaataataatagataatagctaatgtttcttaggtacttagtctgcgccatacactattccaaatgctatatgtagtttctttttcaacgtttgaaagaactctgtcatgtaagaactatcataccaagatgaaactaggtgaacttatccaagatcacacaactttgaagggtacccttgtgtgcactgaggcatgatggctccagatcatgacactaaatgctgcaggtaatgctggtgctgtgtgccctgggtgtacagaaggaaaactacatagcagttttagatatgttaccaaaagcttgttagtttggcagactttaatgaaaagggatagcatccagcgttcctatgtgagagaggaggaaggtgggtgttatcatgtatgttggttctgacttgctaaatgtttctggggcaattggtaatatttaccgaaaggtgaaacccgtgtggctcaggatgcgtcatttagagttctagatggttacttacaaatagactcagtgaagccacaaaggaattgaaggctattgttactgatgtacttttactgacactaaggaaaatcaaagtgtggcattggtaagatggaaggagaagggctgagaaatctacacattaagtctctgaaaatctggaccagctccccctacatactctccactttctcagtgctgtttcttttcaagagtttgttaaaaaggctgaagtaaggtgtgtttgatgttataggagggactgaccttcaaggatgtggctgtggtcttcactgaggaggagctggggctgctggaccctgtccagaggaatctgtaccaagatgtgatgctggagaacttcaggaacctgctgtcagtgggtgaggacatgagctttctaacactcaatgtcagtctcttggagtgattttgtgtcttcaggggttcaacactttggaggtcttgaattagtcgcctacatttgtagacctgactttcctatcagtagtttttagtgaaataaaatgagatagaaatatcagagttcactaaaattaatggaatacatagcaaataaaactggtaaattgcatgagtggtgtgagaacttgtgggaggagatttaatgaaaataaacgggggccaggcacagtggctcacgcctgcaatcccagcaccttgggaggctgaggcaggtggatcacctgaggtcgggagttcgagaccagcctggccaacatgatgaaactctatctctaccaaaaaataaaaaatacaaaaattaaccaggtgtggtggtgcatgcctcttatcccacctacttgggaggctgaggcatgagaatcgcttgaatccaggaggcagaggttgtagtgagcctagatcacgccactgcactccagcctgggtgacagagtgagactgtctcaaaaaaaaaagacattggttagaaatgtaattttagtaatgcaccaagatgtaacagtttttctgttgtttgagataacacctggagttttttgttttatttttaagaagattaatgagtgcagacagaaatgtgaggttagagtgaaggtttaataagcaaaagaagaaagctttttgccagcagagagggggacccaaatggaattccccctatgaggcaggggtttggggtttttatggactgggaaggggaaggaatgtgcttagtttgtgggctattttggagaaagtgtgacttagcttggcccggaaccttggcccaggaccaatcaggttgaagtaaagatatatagagaccggacttacagtttgaaaaaaagaaagtagagtgcccactggaacccactggagcccactgtacctatgcccacaaaaggagaagaaaccttttcctgggagcccgctgactatacagaggacaaaggcattcttatgccaggccttgctcctttatctgagcgagctggaggtatgtacaagcttttatccaaatgggctggaggtttttctatctgtgcagccgtgggcatgtctccaggcacaacaccctgtggtagttcccttattggtgcctgcagcttaaattttttttccaggctgctttttatgttatataaaaataagacactaacccatgggtcaggggctctccaaagacccttcccttgctgtctacctaaggcaagcgaactaactcctttcagaaataggtttttatagcacatatttatgtctatgtgtctggatcttgaaatactgatatttcttcattaggttcttctaaaagtgtttgaaaacactacttttgattgattgatcagtatacagtagtaattcaaattgccagtaagttcagttgtacctttagtgtgtttgttttaaatatgtgactttgcgtgttctagggcatcaccccttcaaacatgatgtattccttttagaaaaggaaaaaaagcttgatataatgaagacagcaactcaaagaaaagggaaatcaggtaagaaccaagcagctaagagtccttgtacgtgattgtccatctgttgtacttctctcccctgctcttgctgccatcgggtccaaattgccaaacctctgtcctggatgattgcaacagccttcgtactgggcgcactgcatccaccctcaatagtataaagtatgttctcctacaggcgttctccatatcatagctaaagtgatcctttggaaatgtaagtcagattgccattcctctacttaagaccttgtacagggctgggcacagtggctcatgcctgtaatccagcactttgggggccaaagcaggaggatcaggagtttgagaccagcctggctaacatggcaaaacctcgtctctactaaaaatacaaaaattagccaggcgtggtggccagcgcctgtagtcccagctactcaggaagcttagacaggagaatcgcttgaacccaagaggcaggttgcagtgagccaagatcgcaccgctacactccagcctgggcaacagagcgacactccatcttaaaaaaaaaaaaaatactctgaatggcttcttatttttcttaaagttgaagtctcttaaaggagcttatagagtcctgcgtggtctgctgttcatcctcctctgcgtctctgactacatctcctgtattctacctcttgctccatcttttccagccacatcatcctccctgctatttcccagacctggtaaggacattgctcgctctgtcgcccaggctggagtatagtggtgcaatctcagctcactgccacctccgcctcccaggttcaagcgattcttctgcctcagcctcccaagtagctgggattacaggtgcctgtaaccacgtccggcggatttttgtattttttatagagacagggtttcaccatgttggccaggctggtctcctgacctcaagtgacccgcctgcctcagcctcccaaagtgctgggattacaggcatgagccactgtgcccgacctggacactgcatttcttactgctgctgtaacatattaccccaaactgagtggattaaatgataaaaatgtattgtctttcagttctttgtttgaagtccaacatgggtctcactacgctgaaatcaagctgtcagcccgtccctgtttcttcccggaggctctagggaaggagaatctgtatcgttcccttatcagtgtgtaggggctgccaaatttcatagcttgtggccctcttcacagccagcaacagtgcttctctgatcattcttctatagttgcatttcccttttattctctcttcatcctttttccactttataaggaccctctaattgcactgggcccacttggataatgtagaattgccttctatttttagttcagctgatttgcaaccttaattccctctgcaaccttaattaccctttgtcataacctgacatattcttaggatgagaattagaacgtggattctttgggggttgattattctgccaactacagatacttctgcctcaaagcccttatttgcccttgtctttgcctggaaaaactcacctacaatcctctcggcccctctcttacttcatcctggtctctgctcagttttaatttcacagtggtggccttttctgacatccttactggaaatgccatcctttactctctgccctaccttctcttgtgtctcatagactttggtttacttgcttgtcccctctctctccccactggaatataatctccaagagtggaggaatttttttgtttgtttgtttattactctatcatcagtgcctaaatagtcctgttacatggcagatatctgttaatataaatatctgttggcataatgaaggcattaatggatggatgtgacctcactctaggggtcttgcagctaggacaggtcatacacaaaccaaaatgaatgaagggggttgcagaacgttatttgttttctgatggctgcacatccagtttcttctgccttaggtgcccttcacgtgaatgtttgtgtgtgcacttgaacctcataccatgaaaacttacaagcatcgtggttgtgaccacactttgagtaacaagccttcccagtggctttcctggaggcttccatcatatggaacacattcatttctgggaaggaataatttttgaatgaagattctgatgtctacttctgagatagctccccccacaagaagataactatttcctaaggtgtcagatagtaactaggttgcaaactgctttcctttcagcacactgcccatctgaacctcatttgcttcttccaaagtgcccatccgtatcactgcccccaggttttgcctcccctgtgccagaggtggaagatttaagatttgagtggcaaaagtgacacagctgaatgttgcctgactctctggttcaaaaatatgctgtgcttttattttctacaaatgtagtagccattaagcatatattaaagaatatagatgtcatacaatttttcctttatttttataaagacctggcttttatgttcaactagttgacattataacctgggaaaaatgaagaaacttcttgctcaaaattgtcacatcatcatagagacttgtcctcctcaaaaaaactacaatttttaagggtcagtttgttaaatctaatcatgtattcatcatatatatatatatatatatatatatgcgccaagagttacatactctcctatgaatattttcccaaggtgtcacggttggaaattgtctttccatttgaagcagtttgtttaattaaggaccaggtaacttctagaaccaaagtttttgagctcttttgagcatgagccatagcaagaaacgcatttttcattgaaattagaacaatgaaacaaacatttcatgtctgtatagattgatattatagctttagtaagcatttcagaaggacccctttcctgctggtggtagtactctgatagtttctatcctggttcttttattctgaatgcttattacaagcttttaaatttatttcacagctcactaaagggctacagtttttaatttgaaaaactgttgtgaaaggcccaacttacctacactgagagcttcagaaggaaccagtgtatagggcttcctgctttctttttatcccaagtgattcttgccaccttcaaattttcttattagcctcaccctggatatacctgtctcttgtacaacttttcagcttctctgcaaaattacaattttctgttcttttcctatttcaaataacatttggaaaagatgcttttctcctaggacttggcttaaattctcacacaaaaaaagtcaagttggggttcatttattcatttgacatgcatttattgagcattcactgtgacaggcacagttctggacaatggttataaagtaggaaagtgtaaaacgagtattatgtcaaaattagaaaatgcttccctcattgatgctgcattgtggtgggaaggacatacattaaacaaccagtaatttagtgtgtccagtggttaaaagtgctgtgaagaacatagacaaattcaagttgctagaggtgaattgggtgaagacaggattcattatttttcaatgagtaataaagcagccctcattggtgagctgacattgagcagagacccacaagacgtgaggaaccatccatctcgctatctgggaagagttcctccctgaatataactcctgctgtgggggtggctttcaaagtttacactgtgacatctttttcttctccctgtctccatctcaattgtgaaagattggagtctacttctttttcacttttttttttttctggaggtctaaattactgtcagcttttagaataatacatgttatcagttcaactttctttccctttagtcctcatgtaggaaacttgctgacagaagctaaagtttcaccatctgcttatctgctaatattttagtcagtatgtggttaggtacttgctcccagcctgcaagtcatgttaaccattccagtcacctggatattgaagtaactttccaataaaatgactcagggcagagttatatagacaccatttaacaaatgtctactgatacaaaggaggaggtagatttttttctctttttcttttttttttttttttttttttgagacaaagtctcactgtgtccctcaggctgaagtgcagtgataaaatcatggttcactgcagcttctaactcctgagttcaagcgatcctccatctcagcctcccaaatagtgttaactacgggtgcgtgccaccacatctggccaatttttttaaaagtttttttgtagggccagagtcttgctatgttgcccaggctggtcttgaactcctgggctcaagtgatcctccggcttcagcctcccaacatgcttggattacagatgtgagccactgcaccctgccaagaggcagcttttaaatgactattcctgcaggaggggagtaagtttttcctctgtaaaaatttccttagaggtacgtctttctgctaaacttttgtggaagagttcatttaaaaaataatttccaaatatttatatctctttatacaagattaaacattttggaatattattaaggataaacctttcagaagggtttaaacattttaaatctaagttatattagaagtggtcaagagtttataatagttgtcagctcatttaatgtctgtcaacacagaaaaataagattaagtgtatatgttatgcagaatattcaagaatatggttgatccttgaacaacttgggggttagggacaccaactcccctcacagtaaaaaatccaagtataacttttgactcccctctaaaactttactcatggcctactttgactgaaagacctactgataacatagtcaattaacacatattttgtatgttataatgtattgtatactatattcttacaataaaggaagaattctttattcttacaataaagagaagagaaaatgttattaagaaaattataaggaggaagaggaggggttggtcttgctgtctcagggatggcagagatggaagaaaatccatgtataagtgaacacatgcaggtcaaacctgtgttgttcaacggtcaactgtattttgaacatgtaaatataaacatttcaggttatttaataatttgaatatgtaacatgaacctaaactgcaaaatatttgattattttcttactttcccttgaagttcttgttgatttatattatctacatttttttttaacttttaatatttttaatagaggtacattcttgctttgttgcccagactggtctcaaacccctggcctcaaactatccttctgccccagcctcccagaatgctgggatatacaggcatgaccatgcctggcctatgctttttatatttagataatttactatttattattctacactgactttaaaattcgatggaaatggcagtacaatttgtatcatgttaatttttaaaattaactctgacttctaacttgtgtctcacataggagacttggtatggtctaatgcctggtagatagcagccaattggaccacctcttgatttatctaggcatggaaatcagagatcatgatacacagtggaaaagaccattacacaaactggaccttctctggatttgttaaaatcgcatgctctcgcctaagtatgacatcttgaaaacttttaacagagcctccacatctctgaattctctgtccttacagcagacaagatccaaagtgaggtggagactgttccagaagcaggacgacatgaagagctttactgggggcaaatctggaaacagattgcaagtgatttaatcaagtatgaagactctatgataagtatttctcggttccccagacaaggtgatttgtcctgccaggttagggcaggactatatacaactcacacaggacagaaattttaccaatgtgatgagtacaaaaaatccttcactgatgtcttcaactttgatcttcatcaacagttacactcaggagagaagtctcatacatgtgatgagtgtggaaaaagcttctgttacatctcagcccttcatattcatcaaagagtccacatgggagagaaatgctataagtgtgacgtgtgtggtaaggaatttagtcagagctcacatcttcaaactcatcagagagtccacactgtagagaaaccattcaaatgtgtggaatgtgggaaaggcttcagtcgtagatcaacacttactgtacattgcaaattacactcaggagagaaaccttacaattgtgaggaatgtggaagggccttcatacatgcttcccatcttcaggaacatcagagaattcatactggggagaaaccattcaaatgtgatacatgtggtaagaacttccgtcgtagatcagcacttaataatcattgcatggtccacacaggagagaaaccatacaaatgtgaggactgtggtaagtgtttcacttgtagctcaaaccttcgtatccatcaaagggtccacacaggagagaaaccttacaagtgtgaagaatgtggtaagtgctttattcagccttcacaatttcaggcccatcggagaatccacactggagagaaaccatacgtatgtaaagtgtgtggtaagggtttcatttacagttcaagttttcaggcccatcagggagtccacactggagagaagccatacaaatgcaatgagtgtgggaagagcttcagaatgaaaattcattatcaagtgcatctggtagtccacacaggggaaaaaccctataaatgtgaagtatgtggtaaagccttccgtcagagttcatatcttaaaatccatctgaaagcacatagtgtacagaaaccttttaagtgtgaagagtgtgggcagggcttcaatcagagctcacgacttcagattcaccagctgatccataccggtgagaaaccatacaaatgtgaagagtgcggaaagggatttagtcgtagagcagatcttaaaattcattgtaggatccacacaggggagaaaccatataattgtgaggagtgtgggaaggtcttcagtcaggcctcgcatcttctaacccatcagagagttcacagtggggaaaaaccatttaaatgtgaagagtgtgggaagagcttcagtcggagtgcacaccttcaagcccatcaaaaagtccacactggagaaaagccatacaaatgtggggagtgtggaaagggcttcaagtggagcttgaaccttgacatgcatcagagggtgcacacaggagaaaaaccctatacatgtggggagtgtgggaagcacttcagtcaggcctcaagtctccaacttcatcagagtgtccacacaggagagaaaccatacaaatgtgatgtatgtggtaaagtcttcagtcggtcttcacaattacagtatcataggcgagttcacactggggaaaaaccttacaaatgtgagatatgtggtaagaggttcagctggcgatcaaatcttgtaagtcatcacaaaattcatgctgctggtacattttatgaaaatgatgagaatagtaagaacatcagagagttgtcagagggaggaagttctacaaggtgattaaaaaaaaaaaaacagaactcatgtacaacctgaatgcttgtaattagatttcataggagggaaaaattttctttatcaacctctttgaatttatttgatttgtaacgctccacatttccacctagacttttttttgttttttattttttgttttgaaacagaatctcgctctgttgcccatgctggatgcagtggtgctatctcagctcactgtaacctccacttcccgggttcaagtgattctcctgcctcagtggattacaggtgcacaccaccacgcctggctaatttttgtatttttagtagagatggagtttca[132 bp omitted]aattacagtagcattctcttatttaaaatatttgttttatttaagtcagtgtttaagcaatagctcagcatatcccagtggtccagtgaccacacagctgagaacccttgttaagtggtacagtaaagcattctgtcaaaactttgacatttatgacatgttacctaggaaataggacttagaaaatgagtttgacctgggctttaaaaaagtatactgatgaaggtgccagaattgatgtccattagactgtaagctccatgggggcaggaactttgctaccgaatctatacaaccttaacattgactagtgcttgtaggtgtgctcaatacttgtttgttaactgaatcaaaaggagtaaatgcacaatatttgaacattgtatccaaaggaagaaacctgcgaaataaaattatttgcagaaatgaacatttgttgaaatgcagaaaaccactggatactgcagcctacaatattaatatgatattactcttttacagttgacacctgtcctctctgtagtctcttctctcaaatttggttcttattgagagcctgtctagtttcccaaaggttttataaaacataagttgaagtacctttatttttaattttatttttgagacaggacctcgctctgtcaccgaggctggagtgcagtggcataatcatggctcactgcagcctcgtcctcccaggctccatccatctgcccatctctccctctgagtagctgggaccacgggcacgtgccaccacacccagctaatttttgtatgtttggtagagaaagggtttcaccacattgcccaggctggtcttgaacacctgagctcaagcaatccaacctccttggcctcccagtgttaaattacaggcgtaagccaccacacccggccaagttgaagtatattttgtgatttttctgacagtgcagactgaaaaaaatttaattaacctgacaagagtttactgaatatcacacaattgagtttttaatccattaatgttaaggcaggggtttactctaacacttttaaagtgtcagaagtagttgccaatgccaaatttttatcagcccccttgaatttatttgatttctgactttccacatttccatccagactttgacatgattgccgtctaataactgtagcattctcttattaaaacttctggctgggtgtggtggctcatgcctgtaaccccagcactttaggaggccaaggcaggtgaatcacctgaggtcaggacttagagaccagcctgaccaacatggtgaaaccccatctctactaaatacaaaaattagctgggcatggtggcaggcgcctgtaatcccagctactcaggaggctgaggcaggaggattgcttgaacccgggaggcggaagttgcagtgagccgagactgcgccattgcactccagcttgggtgacagagcaagactccgtctcaaaaaaaaaaaaaaaaacttctgaggtaggggctgtaccatatttttgccccacacccattaagcgaataccaaaaacaacttgtggaaatttgataattttatcaaatttattatttgggcaggattggcatttaccatgcttttccctattgctggcagtaaaacatgggtttaaggaagagtgtttttcagaatttacactgtatatctctgatttggaagttatataattggaatttatgattatgagattaaaataccaaaaagactaagtaacatatcagtgatgtcaatgaattgttttaaatggaagtgtgtgttcctctataataatttgacttttgatattttcattcctgtattgacctgaagctattaaaatggcggcaggtatctgtaatgacaggataaagaaaaaatatgggctttggaagatcatagactattgcctttgtagcataatgaaatctatacatttttatgagtgagtgtgtatgtacatgcataagataatatgtaaaggatacttttttttttttagcaattttctcttgcaatgagcattttgtggtatttttccattttataattccataaattacattttaatttcttattgaacatcagtattaccaaagcagtaaattatgtacattagaattttaaaaagtgctatatgataatcccttcaaaatatgattgttctatattgttatatggcacataagatcataattaatagattctggaagccaattttaaaaacaaaaaaattctctgaatatgtggataaatggatgagtgtgaacaattgtatctttgcaattaatgtctgctacacttcttttttttttttgagatggagtctttctctgttgcccaggctggagtgcagtggtgcaatcttgaatcactgcaacctccgcctcgcgaattcaaatgattatcctgcctcagcctcctgagtagctgggattacaggggcgtgccactatgtccaactcagttttttttttttttttttccccgagacggaatctcactctgttgccaggctggagtgcagtggcgcaatctcagctcactgcaacctctgcctcccaagttcaagcaattctcctgcctcagcctgctgagtagctgggactacaggtgtgcaccaccacgcccagctaatttttgtattttcagtagagacgggg[131 bp omitted]tttcaccatgttggccaggctggtctcgagctcctgacctcaagtgatctgcccgcctcggcctctcaaagtgctgggattacaggcatgatccactgtgcccggccttgcttgctacattttttaaagcattaatctgtaacacagagagaatcctggaaatgaaaacaaagtggtatacatatgttagggaggtatgtttaaaaaggttcactgaggaaaaagtgtgcataagagcagaatatagtgcaatccacttactggatgtggaaccagtaaggacaaagagtgggtttgaatgacattccatattccttggacatgatggtgatattttcagtgtagttgattaaagcatgggtccctaacccctaggccacagaccctgttaggaacagggccagacagcaagaggtgagcagtgggcaagtgagcaaagctgagttctgccttctgtcagatcagtggcatgaaccctattgtgaactacgcatgtgaaggatctaggttgcagccaggcgcagtggctcatgcctttaatctcagcactttgggaggctgaggtgggcggatcacctgaggtcacgagttggaaaccagcctggccaatatagtgaaaccccatctgtactaaaaatacaaaaattagccaggcatggtggcaggtgcctgtaatcccagctacttgggagactgaggcaggagaatcacttgaacgcaggagatagaagttgcagtgagccgaggttgcgccattgcactccagcctgggcaacaagagcgaaactctttttttttttttaaagaaaggatctaagttgctcgctccttgtgaaaataaaatgataaatgtaatgtgcttgaatcatccccaaaccatccccatccccccacctcaccttgtggaaaaatattgtcttctgcaaagctggtcccctgtgccaaaaaggttgtgaactgctggattaaagggctttactcaataaattatatctaactggggagacttttttccactattgattttcttcagtataccttcactggatgcttgctactcattaaggtccatgctacctcaatgtgcatggtatgctggggattgataataccaccttcacattcttgtaattcactaggaggactcaagacaccctatgttatcatagtcactatgatttattgtagtaaaagataccaagtcagttgagcaaagggaaaatgtgcatgggatgaagtccagaagaaatcaggtacaggcttccaataatccactccctgtagaatcattcatgatgtactgttttttcagcattgaaacatgtgaaatgtctacccagtaagctcaatggagacttagtgccctaggcactacgttgtgttttgttttggaactggtcacataggccagcttgggccaaaattctagattcccagaaggaattcagcataaatcacattatacaaatagccggggcatggtgagccactctcatcagagaattgtggaaatcctcctgaaattcaagttcccagataccagtcaagggctaaccttatatcttgcgctgctataacagaataccacagattaggtaatttataaacaatataaatttatctgtcatagtgcttgaggctgggaagtccaaggtcaagatgctggcaggtttaacatctggtgagggctgctgctgtctgcttccaatatggcatccagttgctgcatcctctggaggagacagatgctatgtcctcatatggtggaagtgatgaaaaagcaagaagggattaagttttaacaagggaacaccatcaaactatagcatgttgcaagcaggccttttaagtacaacagtctcaggcctatgttaactcttttctgaacaaagggcttcagaaatccagtacctatattcttttctttctttttctttctttgtatcaccagataccacattaggtcatcttccttcaaggtaatttgtaaccaaaaccagtagactaaaccaaataatttcttgcccctctgccccataactgataagactgtaggtacagtctacatctaccctcctcatgaccagagttttcaggttagtcacaagacagctgtagaagctgggagctatctggctttgtttttggttggttgttgtttgttcacagtcaagaggagagaactgtttcatttgtaatattgtatagttcatgtctcccaaaatgcatggctactctaactcccattcacacacaagattaattccttagctcttacctagtatgcccagcccttgtgggatcattcagttttttcatctgtgggcctaacttgcctgttcatctttggccgttgggatttccctgtcttagctttgagtttagctacattttaacgctttaggggatattgtcacataacatttttctatctttgaaaagatccacaatattatgtaatgattaccactatctaatcctagaactctttcatctgctcccaaaagaaatcccctacatgagctgggtgtggtggtgcatgcctgtagtctcaactacccagggggctgaggcgggaggatcacttgagcccaagaatttaaggctgcagtgtgctatgatcatgcctgtgaatagccactgtactccattctgggaaacataacaagacgctgtctctaaaaaagtaagaaaaaaaaaaccctacatattgacagtcactccccattcccaactacatctccccagccttggagacaactaatttactttctgtctctatggacttgcctattctgcacatttgatataaatggaatcataccatatatggtatcttgtgtctggcttctttcattggacataatgtcttcagagttcatctatgttataacatgaatcaatattttgttcattcacattactaaataatattgcattatatggctagaccacattttgtttatccactcatcagctgatggacattgggtcttctccactttttgactattatgactaatgctgctatgaacttttttagaacaagtttttgtgtggatatctttcagttctcctgggtatttacttaggagtgaaattgctggcacataagccccagatcgggtgccagcagattcagtgtctggtgaggtcccgctttctaagtcatacatggtccttctggctgtgtcctcacataactaaagaggcaaaggagctccctcaggccacttataagagagcattaatcctattcatgagggcattgccctcttgatctgatcacgtcccataggttccacctcctaatatcttcttgggagttaggatttaaacatacgaatttggtgggggccataaacactcagaccataataatacctaaagagaagtgagggattctgggaaatgaaaaccaggagctcaaggtagttggacacttccacatcagaaggcttggacattccggaagtgtagtccaggagggcggtactgttctgtttttcccccaactccagcattctgtgatatgtagtccggagttccgtgtagtcgcgcatagctcagctgcagtaaggctgtaaatgtttcccctgcggaatcctgggaactgtaggtccaatcgttctaggtagttgtaggcacttccggctcgaggaaggcagtgctgtggaattctgggaagcgtagtccaggtcctcctgatactcgcaggcacttccgcccaggaagacgacgtagcagccatcttttccctggctttggtgattcaggtcagcttctcaggaacctttcaaacttccccgaaatgcacttgtggtcagcagctagcggtcttttgtttggggaaaaaaaggagtagcggctaagagcggaggtttgaggggccaggatgctgttttgcgtttccctgggcggagcttgttagaattgggggcgtactggcttcgggcggctggggtgatgcttcgtcgggtttgaaggtctctcgggctgttcgctccctcattgtgactcccccacctaatgagccagccctaccacttcatacagtatcacattgagcgagttagttaatccccgtgccttcgtttgctgttctgaaggaaaataaaagcaaaaacttcctaatagaatgttttgagagaaaacgaggtaatacaaaaagtgtaaaactgcctggcacgtgaattaccaatactactgtaattttcctagaaactcccgttctgtggcgaaattctgtgagtccatgaagctggattgtccctgacctcttttgaggaaggagagggttgcttctaactggtcctgggagatgccactgtgatgtatccgggatgaagacacaatcctggttacttcatagcctgtttttcttccccagccctgacttctcaaaaagcactgcacagaggaggaggcagcagaaccccatgtgagtaagacttgttgttattcttgttttattcacataaatcagagaatgtgtggggtcatgtatttgggcatgagaagtgattataatttagcgttagttgctaagttccattctaaggggtttatacaaatgaacacctttccactatacagtggctctgtgaagtgatactctttttccgaggagactgagacataagaacataacttgtttgctcatagccacctagctagtaggaggcagagctagcattgaaaccgaggcagtctgagtctagacctgagtcttctttggtatgttctgcatgagccataggcagctggctagtatcatgtgaaaataggttgggacttcactgtggggactttgctcaaggtctgggctattctatgacttttaaaaaatagtggctgggcacagtggctgacgcctgtaatcccagcactttgggagtctgaggcgggcagatcacttgaggccaggagtttgagaccagtctggccaacatggcgaaaccccatctctactaaaaatacaaaaattagccaggcgtggtggccaacacctgtaatcccaggagtttgggaagctggggcaggagaatcgcttgaacccaggaggcgaggctgcagtaagctgagatcacaccggtgcactccagcctcggcaactgagcaagactctgtctcaaaaaaagaaaagagtttttaaaaatagttttctcaattattagttttatttgtttcaaataatatagaggtaacacataatcatggaaaacacagaaatacatttaaaaaatgtaaattccccatgaccttagggtataaagataacaactatagtttagtgcctttctgtcaagtttttcttgtatatatttctgtttattaggggctgttttgggagagggactgagtacagtgcaacactactcaaactgtggttcacaaagcagcaacattggcatcacccaggtagaaaggctcattcttgagccctaccgaaggccttctgatttagcatttttgcagataggacccagaaatctgcatttcaacaagatcccaaggtgagcgagatgcatgttaaagtttgagaagctcaggaaaaggtcttatctggaaactcaggactagaaaactgaccctgccagatgtcacagataaaactgagctggccatactagaaccctactcagtccagtgatttttctttcccactaaatattaactgtcaagtttctttgcaaaaaccatgacatgagtagaaggcagctgtcaagtctagagtcaaaatggagaaactcagagtcctgaagatctatttctcccaggctttggggagtagattccttcccatcttttgtactggaggccttctgcctgaagtgggaagatcagctacctatttattgttaattaacgttagatattattgccatagttgtcatcatctcgtcatcgttattattctgattaatgactttcctaatttctttaactttttttttttttttttttttgaggcagagtttcacttttgttgcccaggctggagtgcaatggcgtgatctcggctcactgcaacctccgcctcccaggttcaaaagattctcctgcctcaacctcccaaacatctgagattacaggcacccgccaccacaccggctaatttttttgtatttttagtagcgatggggttccaccatgtttgccaggctggtctcgaactcctgacctcaggtgatccacccacctcggcctcccaaagtgttgggattatgggcatgagccaccgtgcccagccaactttttttaaaaatataatttcaaacttgtagaaaagctgcaaaaatgataacgtaaggaaatctcatatactctacacccagattcaccagttgttacgtttgtttgttatgttatgttttccctgtgtgctctgttgatgaccatcagccatcaccaggaacatacctgtaaccaacaacaattgtttgttttagcttgctgcatccaaggagcccacacatgcatggggtgtcttggtaagaggcaattaggaggaccctggttatagggttttggtttatgttagatgagttggggagagttttaggcaatgggtttgttctggattggatgctgtgaagaagcagtagtaatttgatcagactattgtaatttttatgttggaggtggggaaataacaagactggagttgtcactgataacaaagtggtcatgttagatggaagaggcaattatttggctatttttatcaatgtaggatgtatttctctctgtgttacaagctgttttgtttttttctttttcaccatgatcactgagtagacctgtctcattcttgttgataaattggaaacaccaggttctggttgttgctgctgttgtcaaagtagttttttgttttgtttttttttttgtctttttgctttcacaactttgtcatacttatattttgtttttgtctttttgctgaagtatttgagagcaagctagagatagtgatgaaaatgaaattagttacattgataacttactgttatctaacccacagtttgtatttaaacttactccattttcccattaaagactttgaaagtaatttcttcccccagatgagtttccagtctaattgtatgcattgcacttagttttggtttcattagtcacctttagtctagaatgattcctcagactttatttcttttttgctctcgatatctttctagagtattgagaaattatttgtaaaatgttcttatttttttgtttccttaatatttattcatgattaaattcaagctatgcattgtcagcagagatgccataaaagtagggaggcatccttctcagtgcatcataggagtcaaatgttggtttgtgggtttgtcccactagtggtctcaactttgtttttttggataaaatgtctgccaggttacctttttccttttgcacttaatactttgagactatgtagccatcttattcctcaccaaactcaccagtttttagcagctattgatgatgttctagttatctttcattctacctttattagtttatgtgttctactataggagctttcttttgtcacccatttatttattac[138 bp omitted]cctccgcctcctgggttcaaacaattcttgtgcctcagcttcccaagtagctgggattacaggtgcctgccaccatgtccagctaatttttgtcttttagtaaagacagggtttcatcttgttggccaggcttgtcttcaactcctgactgtaagtgatctgcttgtcttggtttcccaaagtgctagtaggattacaggcatgagccactgtgcctggccaggttcctgcatttttaatttaagttaggtatggattgtcaaacggtgttttttaattgcggtatcttcggttttattagttcagtgttggcaaattattggaaagacgacaagatgtttttcagaagttataagacactttcacgtgacatagcaacaacctgtgaactccaactatcttataatattctgttggtggaaattatatttttaaggataatttcaaaccatagaccatcttctacttattgcagttgcaaataaataagatacctgactgtgttgtaagagctttctaccttccagcaatccgatgaggttggtactgttattctttaccacttgcagatgacagaagtaaggcaaagagatgttaatagtttccccaaggtgacgcttttagtgtcaggattttaacccatgcatatcaattccaggcctactgtacttatattgtctcaatttacgctgtactcaaaataagaattactggcgtgcaattacaggcacatgggcagtgaggccactgtgtggttagcctggttctgaactactgctgaaaggggtagttggatatctgggatccatgtcataatctgcttaaaagccacataaagctgcagccaccccaagaagcacacacctttgctaattcctaaagagcagccacgtgcattagcaacatacttacccagttttgatttatttctctcttctttcctagttcagcttcttaggactctgcacttccccagaaggaagaattaaaaatgaatatgttcaaggtgagtagagcttgcctttcccagctgttaaaaataccattttagtactcagagatggaaccaggtttttctttttcaagtaagagtcaaggcatctgatgacctgttgagtgtgctaggtgcttattttgttccgtttgagtttagctggttttggttttagttttatttcgtcatttttattttacaa[266 bp omitted]tggaaaccccatctctactaaaaatacaaaaaatgagccaggcgtggttgcaggcacctgtagtcccagctattcgggaggctgaggcaggagaatggcctgaacctgggaggcggagcttgcagtgagcagagatcgtaccactgcactccagccagggtgacagagcgagactccgtctcaaaaaaataaataaataaaaaataaaaaaattagccaggtatggcggtgcacacttgtaatcccagctactcagttggctgaggcaagagaatcacttaaatttggaaggcagaggttgcagtgagccaagatcgtgccactactccagcctgggcaatagagcaagactctgtctcaaaaaaaaaaaaaaaaattaatagaaatgaaaaaatcttatttccataatctcttcattgtatgtacttgtaattatatattggcattcataacatagatataattttacatttcttacatttataacatttatttttgttgtatttctatcaaatttatgtatccagtttttaaactattctctatatacagttagtgtaggatttttactgttttaggaactacagtgttagttttcttgcatttaactttttctgaaaaaatcaattttgaaaaatactgccttttaaaatccgtaacattaggtattcagaattgaaaaggtatgttttgtgtgtggtacttcagattttttttgatagaatattcaaatatggcacagtgtgtcaagatttaacagctgcttcacccagaaaaaatattagacttttttttactacaagagctagattctgtcttccccatgcctcagtcataccctgtgtgtttactggtctttttcccttttaatattttttttagttaaagtagtatgtgaccttaatttaaaatgcctagtggtaggaaaggatttgccaagcacttacactctgcccctgtattgagacctcacagcaactatgaagaggttctttgttttgtctccattttaaacataaatagaaaagggcttgtgaaaaatgaggaacgtgctcaagttcacatggaaaactaaagatccgggatcagtgtattatattcaagtgaaagaccaagacaggaggacagagagagtccttcattcagaaacctgacatgccctttaggtttgtttccacatataacgctgctcacttggctcccacctcagtaggaaggcaggtgctatcaaacactattgggactcaattggtaaacctttctggggaaattggcaatgttttaggttcagcaggtaacagttccaggaaattcccttataagagtactcactgagagcatccagtaaatatacaaagctttctttttcacagcagcacttttggtaagtcagtgtatggcattggcaagacaggagaagggctgggaaatctacaaacggctgggcatccagaacaactttccacctgttctcagtgttacccatcttctagtggacattggttgtaagattgaggtcatttgtttttgtcgtaggaagcagtgaccttcaaggacgtggctgtggccttcacggaggaggaattggggctgctgggccctgcccagaggaagctgtaccgagatgtgatggtggagaactttaggaacctgctgtcagtgggtgaggacagcctccctctggaatatctttgtgcccttggagttttaaggctttgtggcccttgaaattgttccctgagtgtgggaatctgactttcctaatttttgtgggatgcagagacactggatgtttctggtctttctgaacagaatattttaggtctttttcatttgtgttttatagaagaactgtaaatgaacagaatactgctatgccttgtctattctttttcatgttttacacctgtcccagtattgaattataaaaccaacttattgaatgtcatcagcagattttaatgaaataaaatagggtagaaaatactagaactccttaggaagaatggcacacactgcagcaaaaactctggccaattgcttgagtgatgtgagaaccaatgggagatttaaggaaaacagacattagttaaaaataggttattcaaacttggttttcataatatgtatttacgcatgtgtgtctgggtcatgaaataaatggtgtttctttactgaagtcacaatttaaataaaagtttgaaaaacactgctttcagtgtcttgaatgtgcagttgcaactcagatttccagtgtattttaactctaatatgttcattttcaacttgtgatttggcattttcacagggcatccacccttcaaacaagatgtatcacctatagaaagaaatgagcagctttggataatgacgacagcaacccgaagacagggaaatttaggtaaaaaccaaacagttatgagttcttatagttaactgtccatctgctttgcttcttcttagccttgttgccatcacctggtccaaattgccaactgtctttcctggattattgcaacaccctttgtactgcttgccctgctcccacccctctcctcttacattctgttctttaagtggcaaagtgagtttttgttaccttgtgtcagactatgttgttcttctgctcaaaattctctgtgacttattttacatagagtaaaatccacttaatgtggctgacagagtcttacacggtgtgcttttcatcccccactacctctctaaatatatcttctatactctctttctgtgaattccagccacattgtcctccctcttgcttttcagacctatcaaggatgcttctgcctcacaaccctgtgtgttcttccctctgcctgaaataatcttttacctataatccttctggtcccttcttcattcatttctttgctcagttttagtattataagaaaggcctcggccgggcacggtggcttgcgcctgtaatcccagcacttcgcgaggctgaggtgggcagatcaatcatgaggtcaggagatcgagaccaacctggctaacacggtgaaaccctgtctctactaaaaatacaaaaaatcagctgggcgtggtggtgggtgcctgtagtcccagctactcggcaggctgaggcagaatggtgtgaacccaggaggcagaggttgcagtgagctgagatcgtgccactgcactccagcctgggcgatagagcgagactgtctcaagaaaaaaaaaaagaaaggcctcctctgaccaccctattaaaaatacattctctccatttactctctgtgcactgccttatattgtgtgtaagcactgattatcacctcatatatgtttttgtttagtgacgtttgtctcctcactggagtgtaatctccaggagtggaggaatgttatctatttgcttctgtctcctcagtgcttagaatagtcctagtatatggcagagacactataaatattagttgaataaatgagttaatggaaatctgtcttccatggaggtaactaataggtggtgaacaaatcagcataaataagggatattgcaaaatattttttgtcttctaatgaattcctaacctaattctaatttctctttgtgtgtgtgtgtgtgtgtgtgtgtgtttgcatgtgtttgcctgtctgtacaagttgacccatatcttggggaacctatagtgtcatagttgtaaccaaactgaataacatgctttgtttatgactttctttgagcatttgtagcagagcatattcattcggggagggaatattttacaataaggacttttatttctatttcttaggtattcccccatagaagggaataaaattcgatttccttatccattatatcaggaaagaaaaagtaaaactaaaaaccaggacatgagcattagcctttccctcaaaatgtttgcacagttgcatcccatttgcttcttccaaagtccacattcataaaaagaaatggatcttacattgttgcctctcaaacatttatatcgtgtaggcttatatgtatgtctttagaaggccttttatgtaatgacaccattactgcttgtgattattctgatatgatactttatctgtttttttttcctaaatatcacaagctattaaatttatttcacaattgactagtagaccactttgtcaatttggaaaacattcttgttaaagacaaacatatctacatccagaaactttctataccttgctttcaaagagacagcattctttgctagccttccaattttgactcagtgcaaaagccttagaaggatccagtgcataggtcttcatgctttcctttcaccccaagtgattatcaactttgatttttctcttcagcaataactcacttggtgtacccctacctcaggtacagcttttcaactttgcagcaaaactgtactttctagttctttttgtatttcagataccttacttgtaaaagctcttttgctctatgacctggctcaaacttaaacttggatttgaagttagaagaaatgttggaagtcatttatatatgaagaaatgttggaaggactcatatatgcatacattccttgagtgactatgaatgactgccgggcagtaacttctgggctgtggttgtaaactgtgagcactacaaaatgtttttccttattgataccatattatggtaggaaagacatggaataaaaaatttagatagtatgtcagtagttgtgtttttaaatgggtttcattagtgcttagcaattgggagcttggtggaccatctcttggttttggaccatctcttggtttctgtcagtatgtaaaccagaaacttcaaatgtgtcacaaaagatgagcagaactatcccgaggttcattaaagtcttttactctgtcctcagtgtgaaatcttaaatctttgaacaaaaaaattcactatctctctgaatcctttgtccttacaggagagaaaaatcaaagtaagttaattactgttcaagacagagaatcagaagaagagctttcttgttggcaaatctggcaacaaattgcaaatgacttaaccaggtgtcaagactccatgatcaataattctcagtgtcacaaacaaggtgatttcccttaccaggtagggacagaactgtctattcaaatttctgaagatgagaactatatagtaaataaagcagatggtcccaataatactgggaatccagagtttcctatcttgagaacccaggattcttggaggaaaacattcctgactgagtcacagagattgaacagagatcagcaaatttccataaaaaataaattatgtcaatgtaagaagggtgttgatcccatcggttggatttcacatcatgatggtcatagagtacacaaaagtgaaaaatcttatagacccaatgattatgaaaaagacaacatgaagattttgacatttgatcacaatagcatgattcacacaggacagaaatcgtaccagtgtaatgagtgtaaaaaacccttcagtgatctctccagctttgatcttcatcagcagttacaatcaggagagaagtctcttacatgtgttgagcgtggaaaaggcttctgttacagcccagttcttcctgttcatcagaaagtacatgtgggagaaaaacttaagtgtgatgagtgtggtaaggaattcagtcagggcgctcatctacagacccatcagaaagtccacgtgatagagaaaccatacaaatgtaagcaatgtgggaaaggtttcagtcgtagatcagcacttaatgttcattgcaaggtccacacggcagagaaaccttataattgtgaggagtgtgggagggccttcagtcaggcctctcatcttcaggaccatcagagactccacactggggagaagccattcaaatgtgatgcatgtggtaagagcttcagtcggaattcacatcttcaatcccatcaaagagttcatacaggagagaaaccatacaaatgtgaggagtgtggtaagggcttcatttgtagctcaaatctttacattcatcagagagtccacacaggagaaaaaccctataaatgtgaggaatgtggtaaaggctttagtcggccttcaagtcttcaggcccatcagggagttcacactggagagaagtcatacatatgtactgtatgtgggaaaggctttactctgagttcaaatcttcaagcccatcagagagtccacactggagagaagccatacaaatgcaatgagtgtgggaagagcttcaggaggaattcccattatcaagttcatctagtggtccacacaggagagaaaccctataaatgtgagatatgtgggaagggcttcagtcaaagttcgtatcttcaaatccatcagaaggcccacagtatagagaaaccttttaagtgtgaggagtgtgggcagggtttcaatcagagctcacgacttcagattcaccagctgatccatacgggtgagaaaccatacaaatgtgaagagtgtggcaagggatttagtcgtagagcagatcttaaaattcactgtaggatccacacaggagagaaaccatataattgtgaggagtgtgggaaggtcttcaggcaggcctcaaatcttttggcccatcagagagtccacagtggagaaaaaccattcaaatgtgaagaatgtgggaagagtttcggtcggagtgcacatcttcaagcccatcaaaaagtccacactggagataagccatacaaatgtgatgagtgtgggaagggcttcaagtggagcttgaaccttgacatgcatcagagggtgcacacaggagaaaaaccatataaatgtggggagtgtggtaagtacttcagtcaggcctcaagtcttcaacttcatcagagtgtccacacaggagagaaaccatacaaatgtgatgtgtgtggtaaagtcttcagtcggtcttcacaactacagtctcatcagcgagttcacactggggagaaaccttataaatgtgagatatgtggtaagagcttcagttggcgatcaaatcttacagttcatcacagaatccatgttggtgataaatcctataaaagtaataggggtggtaagaacatcagagaatccacacaggaaaaaaaatctataaaatgattctttgtgaagactcgtgtcatttgaattcttccagttatcaagtctcaaagtcagtgtttcagccgtagctcctcatgtcccagtggtccaaagacaacaaaacaatctttatgattagcatagcaagggcttctttagtcagaaccttgacctttataaaatgttacttagaagaggggtgttaagagtgaaatttttctcaggccttttataaaagtatcatggtggacatgccaaaattaagtgtccactagaatgttaactccataaagacagaaactttgttcactactgaatctacataatcttaccattgccatatacttcacaggtgctcaatatttgttaataggtcctttttgaaaattatgttgagatcacctgcagaatatcatgaatttgtaaacaggaaacctgaaagtagccttaataagattaagtcgggagaccattgaaatgtagaaaaccactcaatactgaactccccaatgttaatttggcattgtcttgtgattagatcctgtcctcctttagcctcactaatcaagttgggtcctatcttcccagatgtctagttttctactggttttataccatatagattcaattatcttttgtaacagataattgtgttcatcttgtaataactggacactacatactacacttattttttcaacactgttaaggcaggggtttaagtgtcagagttgctaatgacacattttttagtagatgttgatcattggttttttcacattttcattcaggctttgacatgattgccttctaagggctttagcattactttaatcagagtttaggttgcggctattgcagatttcttttgtgaacttctctcccccatattctgagaaaaaggacaaaatattagttaaaatttgataaatttcatcaaaaatcgatttttggagcatgactttcaccctttttcctagtggtggcagtgaaaaaaatgcttttggaagagaagttagtatgtatcagaatatagaatgtgcatctcttttttctggaattcatagaataggaatttttgattaggagattcaagtagaaaatgtaagtagcacatcagtgttaatgaattttgtaaaaatagaaataattttttatatactacagtaaaaaggatccttgaaaatgatgaccaaattttatgacagaagagtgtaacagtttagtttaagaacatcacaggctgggtgtgatggcccacgtccataatccccgtactttgggaggccgaggtgggtggatcacctaaggtcaggagttcgagaccaacctggccaacatggtgaaaccctgtctctactaaaaatacaaaaggtagctgggcgtggtggtgcgtgcctgtaatcccagttacttggggtgttgaggcaggagaatcgcttgaacctgggaggcggaagttgcagtgagtcaagatgttgccactgcactctagcctgggcgatagagtgagactcagtcttaaaaaaaaatcacataccttaaattcgtgtgtgtccatgtgagtgaatagtgcatctaatcgtgagtctgtcctatgccaccacagcatcgaagagaatgcaggaatttttttcacatttaacttctatattttaattttttaactgagcatcggttttatagtaaaatactgttattttacagtaacatagtaaaaatataatttaaaaaattactagaatatattaatcccttacagttaagaaatcttgtgtcatcatatagcatataaggccaaaattaaagaatggaactctggaaatcaattataaaaacttgtatggtggttcaaagatacagatgcattggtaagagtgaatatatatttgcagtgaatgcatttgaagctgcttcttaggtacaaatctatgcaatcaatacagttttaatgtaattccagtagtaggaatgcttcttaattcttgacagacttactcactggctgaatggatagataacccagggcactggcttgtcttttcaagtgcttggtctgattgggggaaatggctgggcctttctaggtactgtatggcaaggaaaatcgagctgtggaaaaaaggaataataaaatttacagaggccaggtgcggttgctcgtgcctctaatcccagcactttggatggctgaggcaggtggatcacctgaggtcaggagtttgagcccaacctggccaacatggtgaaactccatcactattaaaaaaaaatacaaaaactagtcgggtgaggtgatgggcgcctgtaattccagctactcaggagtctgaggcagaagaatcatttgaacccaggaggtggaggt[137 bp omitted]ttttgaggtaaaatttaacaaagattccctgaggaaaagatgtgcgtagggagagaacagcatgatgccagtgaaaacaaactgggaacaggcagttaagcaggatcgaataccatttctttcttaggcgtttctgtgacatttaaagcttatttggttaaaggctttactcagcaaaggatatatctgtgaggtttccacaattttctctatttggattacaattcctgttgttcctggactgcatcttcacatgctaagtatgtaaagtccatgatacctcaagttgtgttagatatcagaaatcctgagtcttcgatgtttagtttgctcttagatatcaggatagcccaccaactctcagtagcttagtgagttaagtcaggggtcaaaaaactaccccctgtgggcccaatccagcccacttccttaaaggtttattagaatatagcaatgcctgtgttttagtgtattatctatgctttcttgctgcagtgtcaaaatttagtagttgtgacaaaaactatggaccacaaaatctaaaatatgtgctttctggccctttacagaaaaacgtgtactaagccttatgttaaaccaaatgatttgtctcccataacttaaaaaagaccccaggtagagcaggacttagacctgcttctgtcaggattccaaaatgattttttttgattctcatatctgcccttctggttaaccctggtctttaggttcaagatggggctagcaaccagggagcacctatcttttcttttcagtcagtggaagggaggtgctctttcatttgtagtgttaggtagtttactactcacagtgtttgtggctcctctggccttgattctcatctacactcaagattagacagctagttgtgtgtccagttcttttggcctttgtgaactatcaagtttcaactcagccaggtgcagtggctcacacctgtaatcccagccctttgggaggctgaggtgggaggatctcttgagctcaggggttcaagattagcctgggcaatatagtgagaccctgtctctccaaaaaaagttttaaaagttagctagccatggaggcacacatgtgtggttccaggtactcaggaagctgagatggagggatcacttgagcccaggaggttaaggctgcagtgagctgtggtcccaacactgaactgcagcctggtgacagagttgagacactgtctcaagaaaaaaataagtttcatctctcccttgcaccatggactcaacttccctattttgagcctccaggagatttttctatcttagcttttagcttggctgcatattaacatttgggagaatttgttatatattatcaggattcctttgtttttgagaaagagggatgcaaagccaaaatcagcggctgaatgacaacacatttaattcagaacttttagggtgtcttatgtcacaaggcatcaatgagaaggaatggaatcctgaaaaatttgggaacagatgagcagattccaacaaagctgagggttttgctcaatctagctgagcatctcttgccgttagaaggagcccttcttcctctatttgaagtcagtctcccttgcctgaaaagcctgtgatgaccttccctgagatggtttccttgcaaaaggctttagatcctcaagacttgcttccactacctctcatttttctagaccaataatgaaactcgggtcttcacagacaatgggaggagtcaccaagtagaaaatacgaccatgaggagatacatcgccaaagtaaggatttttgtaatttatatcaatagaaacctgagaaatagatatggttgtagatcttaccagtgttgaatcaggtggaaataatacaatgatggattaggctggatttgctgatatgggtgtagtgaacagtgattccagacccactgttagcttgagcacctgggaatagtttcaacagttttctcagttgtatgaaacttggatgcaaaaacgttagcctaccctaaagtaaaaaaaagccagaactttgtaagtatgttatagaatttctcgaccttggcacaactgacattttggactggatagctctgttaggggatgctctatgcattgtaggatgtttagcagcatccttggcctctagccactagatgccagtagcacacgtgatgcgcgcgcgcgcgtgcatacacacacacacacacaaacacacacacctcagttataacaagcaaaaatgtctccagacactgccagacagcagtgcgggggtttggaaattgtccccaactgagaaccagtgttatagaacatatacagagacataggaatgccagaatgctggagtggatgtatgtaaagccttactcaacccttgtactctgggaagattcggaagacactctttgccaaggacttgagaagttcattggcgagaggagcattggcagtttgggagagctctgtagtaactcttctcggcagaccaggaatgggagaggaaaattgtgacattgaaatgggctttaaaaaaaaattcaatgaggatgatgggatcctggagcattaggggtcaagtggaggcactttactggtagagacaaaatgagtgcgtttatcacaatgatcagcaaagtcaaagggattatcagagatctttgcatttgttcatagattgtggtgtccctctggctgaaatagaccagaagcctactgaatccctgcttgatttgaataagtggaaagactctgggtctggtaaatcaacatgagagagaattgtggcctctaaggcaattacataatgtgaatgagttctcattcccagaacaccttgaatgaagtgtaggtcaagtcttcttgagaaagtacactgatacgctgccgaaactgacttatactaccataaatcatcctgcacttctgcaaagtgacttggcaaccatatttaatggagctgtgattaggtaattggaaacagcctgaatatggagggattgattactggtcactagagctgaattgacattaactctgagaaccctaaaatgtcactgtagcccaccaggtagcagaagggcttatagaggatgaataattaatgaatgtttttgcttaggcccgtttgtggtggtctgaatggagccctgaactcatcctctgattatttcccaagtttcagaatgcagaattgcaccagctgcattcaatagctgacagaatcctcatactgaatgttccctgatccatggaaagagggctattttgccaaggacaaacactataaatgctttgtatgtgccaaaaaaaatgataacctgaaagcaaaaccacattcatggaggaattgcagaggttagtgccactagcagtatcttgaaagttgcaagggttatggttctatcacatcctgattcaaccctggtgatcaatagggtgacagatgttgcagccagatcaccttcatgttcatatgctgattgattcactcaattgacgtgtgcagagatacttatatcctagagaattacatgaaattatttgaaatttaattagaaattgacttcatttgcagttccagatgtggttttatttctacagcaaatcaacatgtctgctggcacctgatatagagagccaccaagccaatatgtgcctttttctctatacctgcctgtaaatgtcatccacagaagtttagtttggtagggccatcaatacacttttaaggtcccagctcagttctgtatctactttccagtatttttcacaatttacccagggattggtaaactatgtttcatggactaaatctcctgcaacttgtttttataaattgtctcattgaagcataaccataaccagtttttacatattacccaggagtgcttttatgctaaaatgacagtgttgagtagttaggccacagagatcatgtgatctgcaatgcctaaaatatttactgcccggctctttacagaaataactttctgacccctgctctactctgtagatacaatgctgattgtactttctaagcagaaagaagcaattacaatagacattttggttagaagatggataatacaaaaattcaggagc[133 bp omitted]aaccctgtctctactaaaaatacaaaaattagccgggtgtggtggcgggcgcctataatcccagctgttcaggaggctgaggcagagaactgcttgaatccgggaggcggtggaggttgcagtgagccgagattgcgccactgcactccagcttgggtgacagagcgagactccattaaaaaaaaaaaaagatttctaaaggaccagtggtatcggatattccaagatacctgttccaaagtgaagagcaaatagctgcatatgacccttctaaaaccaccagggaagagacacaatgactactaggattcttagtgagttttgtatgtgtgtgcttcactttaaacatttattatggtacaaaaacacataacactaaatttaccatcttaaccatattttatcttaacatttttaagtgtacaattcattagtgtaaattgtattcatattatgcaacagatctatagaacttttcatctcacagcactgaaaatctataccagttagatactatttcctcccccctcctcccagcccctggtaactacctttctaaattttgttcctataattttgactactttagatacttcatgagtagactcttacagtatttgcccttttgtgatttgcttatttcacttagcataatgttctcgaggttgattaatgtcgtgccatgtggcaggattttcttctttttaaaggctgcataatattgcattgtctgtgtacagcacattttctttatccattcttctgtcaatggacagttggattgcttctacatcttggctataatgctgtgatgaatatctattcctttgagatcctgctttgagttcttttggatatatacccggaagtgggattgctggattatccagtaattctatttttaattttttgaggagcctccatattattttccataatggctataccattttacatttccaccaacagtgcacaggtcttccaacgttacatccttgacaacacttgttatttttctcttcctttaccagtgaccacaatagtgggtgtgaggtgatatctcattacagttttgatttgcattttctaaaagattcatgatattgaacatcttttcatgtacttattgacaatttatgtatcttctctggacatgtgtgtttaagaactttgcccatttctttcattggattatttggggtttttttgttgttgttgttatagagttgtagaagtttcttatataatctggatattaaccctttatcagatatataacttgcaattttcctccattctgcaggctaccttttcactctgttgattgtttcttttgatgcacagaagtttttgagtttgatataatcccatttgtctatttttctttccattatctgtgcttttgttgtgatagccaagaaataattgccaaatctaatgttctgaaggttttcctttatattttcttctaggattttaacagttttaggtcttacatttaggcctttaatccatttttatttaatttttgtatacaatgtaaggtaagggtctaactttattcttttgcatatggatatccagttttcccattaccattttttgaagagactgtcctttcctcattgtgtaatcttggcactcttgtcaaaatcatttggttatatatgcaggggtttatttctgggttctgtgttatattggttatatgtctatatgccagtaccacgtcatgttaattactgctgcttttgaagtatgttttgaaattagggagtgtgaggcatctgagattgcatacaaattttagaatttttttttcctatttctgaaaaaaagtcattgggattttgatagtgattgcattgaatctgtaaatcactttgtgtagcatggaaattttaacattattaagtcttcaaacccctgagtacaggatgagttcccatttatttgtatcttcttagatttcttcttttattaataacaatgttttgtagttttcaatgtaaaaatatttcagttatttgattaagttctttcctcagtattttaccctttttgatgctatagtaaatgaaattttcttttcacgttggtgattgctagtatatagagatgcaactgattttttagtgctaactttgtatcttgcaactttgctgagttattagttgtagcttttttgtgtacgtgggatctttctacatataagaccaagtcatctgcaaatggagaaaattttaattcttctttccaatttggatgtctttttaaaaactttctgattgacctggctagaatatccagtactatgtcaaatagtagtggtaagttgggcatccttgccttgttcctgatcttagagtaaaagctttcagtatttctccattgaatatgatattaactgtgggcttttcatatatggctgtcattatatttaggtactttcctttcatttctagttaagtggttttttttttttaatcatgaaaggccctttattttgttatgtggtgtattacattgattgatttttatatgttgaattataccaggtataaatcttgcctgatcatgacctgtgattcttttagtgtgctgttaaatttagtttgctagtgttttgtttaggatttttgcatcaatatttatcagagatattggtctacagtttattttcttgtgtgtctttgcttttggtatcaggttaatgatgacttatagaatgagtttgagagtgttccttcctcttcacttctttggaagaatttaagaagaatttgtatgttaattcttctttaaatatttggtagaattctgcagtgaatccatcaggtcctagagttttctttcttaggaggcttttgatgactacgtccaatgcctcactagttatacacctgttcagttgttttcttaaaatttcttcatgattaagtcttgataggttgcatattcctagtttatccatttcttctaggttatccaatctgttggtgtattcttcttcatagtaatctcttatactttttttatttctgtgacatcagtcataatgtctcctctttcatttctaattttaaatatttgagtcttctctttttcttaatctagctaagaaattaattttaattatttttactaattaatttgtcaattgtgttaatcttttcaaaacagactcttaattttctttttaaaagttattttcttctctctattttctactctaatctttactattttattccttccgctgacttttggtttgcttgttcttcttttcctatttccttaaagtataagcttaggttgttgatttgagatatttcttgtttttaaaggtaagtgtttaccaatataaatgtccctatttggattgctttcactgcatctcataagttttgaaatgttgtatctctgtttttatttgtctcctgatgttttctaaattcctttatgatttattttttggcccattggttgtttaagcatgcattgtttaatttccacatatttgtggaatttcttgttttccttctactattaatttgtagttttattccagtatagttagagaagatactttgtataatttcagtcttcctaaatttattaagacttgtaatatagcctaacatggtctatcttggagaatgtttcatgcacacttgagaagaatgtgcattttactgtcgttaggtgaagtgttctgtatgtatctgttagatccagttggtctttagtgttgttcaagtcctccgtttcctcattgatcttctgtctagttctatccataattgaaagtgggatattaaagtatcctactattattgtgttgctgtttattccccattcagttctgtcaatgtttgttttatatatttgggcactctaatgttaggtgcatatatatttacgtagccctctgtatctgcaggttctgcatccacagattcaactaatcttggatcaaaaatatttgaaaagaatgaaccgttgcatttgtactgaatatgtaccaacttttttgggtgattattccctaaacaatacaatataatgactatttgcatggtattgacataatattaggaattataaatagcccagagatgatttaaagtatatgagaggatgtgcataggttatatgcaaatattgtgccattttatgtaagggacttgagtatccatggattttggtatccacagagtgtcctggaactaatcccctgtgaatactgaggaacaactgtcattgttgtatcttcctagtgagttgaacttttaatcattatatgatatccttctttgtctcttgtgacagtttttgtcttaagtctattttgtctgatataaatgtcaatctaaatagaagagacagagtctctctaaaataaaattacatttattcaggaatgagcatttcaatgggaatacagtgggtatattcagggaggtaaatgaagacaagagttttataaggaaaaatgaaaagggccacataagttgttttgaaacaatttttcttgaccacagggttcagtaacaacggtggtatcagtccaaggttggacagccagttgctgggtagatgtcttcatggaagtagttttgtttgtgtaaggtcatgacatttgagcaacaatggaggtttggagggagtggctcttaggctaggtctacctggagtccgttgttaagttcaattttgtttgttctgtaggtgtgggctattatttcaaagctgtaggccagcattattgtgttaggagttgtacttccacagaaatttgacaggcaacaggtacaaagtttaaaaagaaagatacgaagtaaaatttatactaatatgatcatcccagtttgcataatggtttcgagccatgaacctgggcttaaaggcaagcaactgaatcaatcaaatgatcattgggaattaggtgagacctaatgtaactatgtgcgtgttttcttattttgtgtatttgggtctcaacttccccagaggaatttatccaggtatgcatgtagtcctagcaatagcatagacactaccttatttaaccagtagataatatagaaaaattttgtcatctgatatctcatgactgggttgaattaaaagcatagagtgagtgacagttgtattaggaatatttttaaagttggactaaaggattctttggtcatgtaaagatctacagttggcataacagatctaacattttgtcaagttgtccacataagctactaattgtaaaattttaactacaccattatcctgcccagtgaaaaagttaagcataggcaaggacaaactaagaggggcaacagtctcattatgataaagattgttctggcatcttgagaaagctgtccacagcataaagacatcaacttctcatcctggtttgtagtttgaatgtctctcgttatagcatcgggtggtttggtgaactttctgcatgacccacaaatcaggcatgaggcttgtctcttaaaatttacatcaagttttctagcttcagcttacagggctttaggaaagagtagttcccattcttagtaataacatgggagaaaattagattagggaacctagaataacttaggatccagtctggtctacagtagataataaaaactcaaagacaatgcacagaactacaatctaataacagatgtattatagtccttttctagaaacataattttgtctctatatagttatcctaatttctaccaaagataattacagtaagactgatttgtttgtaaataagtttagttttattattattttaggttcttgtattattttattagttttattattttagttttttaaagtttatttattacttaataatttacataagagcagcaagagtagtaaattgagcacaaaagaatctcagattttattttattttatttttttgaggcggagtctcgctgtgtcgcccaggctggagtacagtggcgcgatctcggctcactgcaagctccgcctcccgggttcctgccattctcctacctcagcctcccgagtagctgggactacaggcgcccgccaccacgcctggctaattttctttgtatttttagtagagatggg[135 bp omitted]tctagaaagccaaacaaaggcagacttcagactttgtttgcagtaccaataaaaatttaaatatggcattccagttttaattggtaatacaaccaatgtttttaactgtatcatgttacaaggaggtacagattcatactgaatgtatgcaaataattatattgtcatttaagaaacactagcaaatcacttccaaattttgaagggatcaaatagaaaaaaataaatatttccacctttgttcacagaagtatattttaccaaattgttgtaaactatagatagcttaagagaaaatgtttccttaaacttggaagacaaaacatttcagtaaaaaaccaacaatgtttaaattaaaagttataaaaacattatcagttattcaatttcatgtaattagtttttgttatgcttgatcttgattagcagtttcacaaattcatcagtttcttcactgcagttgtgaaaagttttatttagttcattaatcttgaagttattagaaacttgtatttaagagtacttattagagtcttttccatgaatctgattgcagatacctttagagaaaaatcaaaactatggatgtcaaagacttagaataaccatcattaaaaatctgatgggagttcagcagttgagaaggaaattcaattatttctattgtatttagcattttaaggtaacaaccagaatcgtggttgatagcattacatcaggaccatcagacctttttaaatttcacataatatttaatatacatcaataacatatccatgtaacttaaagaaaatatagcatcactttattatttgacattgattcccatacaattaatcaaataagccaaattagtttaacatctctacaagatgatacctcctttaaggttctccaggggcccaactggaaaatctctcagttaattataggtcaaaaagacttaatttagaactttgatcctggagagacctgccaaaaatgtcaaaatggttaaaacatttaattaaaacagaatcacagattattgtggaataatagtcattcacttaatcagagtgaaaagagattccaaaagcaaatacagaacattacatggattaaaaaaaaaaaccttaattctttcaaagctcctaagtaatgaaaaacctaataaagacaacatgaagcatgagaaattattttgataaaacaaaaaatctttgtttcctaggccagctatcaaaagataaaaaccttctacatatttaaaaaccccttgtgattgcttctccctatgggaaacccatttcaataacctggaagttgagcctgatgaaaaggtacttgaattcaactaaacactggaagagtgtgtatccaaggttatgagtgtaccatattatagaaaagataaacaagaaaacaagtaccttgagcaggcggatatgtggctcttagaaaaagtaaaagaatgtggaatttattggttaaacagcaattcagacacatcaagaaaagacaaaattacagaatcaaattatactggaagaaaatattattcccctagattctcctaggccttaaagacaaacatttttagtgttaggccacaatagcagagtcagaactggagagagagccagagagagagcgagcgagagagcgagagaagcaagaggagtgagaggtgagagagggagagagttacaggagctgactccaaagttgagggagagggttatcatccctaaggagacaaggaagagctgaaggcaatgatgcatgattttagtcgttcacttaatcagagtgaaaaaagcttccaaaaacaaatgcagaactttacgtagatgtaaaaaaaacaaaccttaattctttcaaagcacctaagtaatcaaaaacctaattaaagacaacatgaagcatgtttctcatcaaatcatgtgcaatgagatacagcaaagtggaactgagatatgaatttgaaaagcttcaaaaggaaagttcttttgagaaactaaattactatttttaaatgagggagatagtattttaaagctggaataagggaaattaagtggaaagtgtaaaacaggaaaaagctgcagttcagaagacggctgaaaatttaaacggatttcagaatatcaaaacctcttgcagattttttttaactaaaatcacataaatacatcaagaaaaccttgttgctttaaacataggtgaatggattctggttttgtatcactgtattaatactcaatttttgataaaacctgtgaataattcccttttaactataggcaacttgattaaacacaaattttttccataagattcatcttatataaaaagaaaattgtctgacaaatatatccaggcaaaatgtatgcttgcaattctgaagacctcactattttaacaacaattttaaaatcagtttatttaccaaagatttacctaagtcacacaaatttttaaaagttgggtttattactatttttagtaaatagttatttactattttttctgataaattgcttaattttttttctttacatcagtttcataaagttcttttatatatttctgtagaagaatattatgtatgtataacacagaccaagaaacatacagaaacacaaaaagatcttatagcttatcactgtaaaattgtagtcaagaaactgtaaaatatactaatataaaatcacaagtgtataaaaaaagacagttggatccaaattatatttctgaaaaaatgggacaagttaagatcagtttttcatattgctaatcttttttttttcttttgcctttgataggtaatcttatgagggaagtggaccaaattttgggtaaagctgtttttatagcattttagtttttgaaaaatcttttacccttttttcctcttcaattttaaatgagttgttttaattaacttctggatatttacatttcagttaggattggctagaaaaataaacttccaagaatccttgaacttattaacaaatttaatacaagcaaacaagttagcagattcagagcgagcagagaaaaaaagagagctagcttagaagcccgtacatgttaatcctacagttccagtctcttaattcagctctaaggaaacaagcttagagagtttaaataattcccataatggccgtacattatccttagtgtaatttgccaattattttttaaatgtgcatgagaaaggaccataaatttcaaatgtatagctgcctcaagtgccagagggcttggcattctttagaagttgaagatcccattgcatttcttatcaatctctcaagagcaaagaaaagcccaaaaattttgtcaaaagcattgaccaagctgttttgttttaactagtgtacctgacacagaattcatctttttatacttggcagatggcctttgtcctagttgtctaacctatgaccaagttttccctggttgtgtagaaattttcttgagactggcaggtgcctcagtggtaatcttccttgtctgtgactattttatccttacatgggagacgttttctttggagactggagtccgtcatagatggcagtgacgttcctagtggcatttattattattcttattttgttgttactgttgttgtttagatacaaggtctcactctgttgcccaggctggagtgcagtggtacaatcacagctcactacagcgttgaactcctgggcaaagtgatcctgttatcgcagcctcctgagtagctggggagacacgcgtgcatcaccacatctggctaatttctaaagaaatatttttagagacagggtcttgttatgttgcccaggctggtttggaagtcctggtttcatgtatttctctcatctcagcctcccagctggctgggattacaggcacaagccaccatgcctggtcctagtggctttaattgtccactaaaatcagtttatttaccaaagatttacctaagtcatgtgaactttaaaaaaatgtgagttaactactatttttctgataaattacttaagtgcttaatttttttctttaagtcagttaaatagagctctttcatacattttggtagaaaatattacatacatatatagacacaagaacatacagacaacacaaaaagatattttcccttttccctttaaaattttagtcatgatacattaaaacagtaatatactgtgccatttagaatgtttatttttgctctttgaaagtgttcagaaacaagcagggaaaacaaaagagccaaattatttacagttgcatgtaaccaaattgacatgaaaccaaatgaagcgtgctcacaaaaattttaagccaggcttgcagagcaaacaaaatataaaaccgtgtttgcagaaaaaccaaagcaaattcagtagaaaatacatgcctcacagaacgtaagttctgtgggaaccagagtactctccaaaagaacacttggccttataccagaagaggctttccagaaaagacaaaaagtcttttgtagtcccacaagggttgcaaggtccttaatttaaggtggccttatagccaaatccagatcctgaataaagtcaaaagaacttaccaaacgaaggacgtctgagaatctaagcagagattcaccagagcagagaaggaaggccatagaagcagaggccacaaaaggggtcaatgttggtacctcactagattccaggggatgctggcctgtttgaggtcagctgacttcttgacacaaactttatgtcaacctaaatagcagacacagagagaagatgtctaaaagaaaattgtatttattcaggaatgagtattgcaatgggaatatagtgggtgtattcagggaggtaaagaaagacaagggcttttaaagaagtgaggagggttacatgagttttttgaaacaattatctttggctacaaggatcactaacaaaggtggtagtagttcaaggttggacagccagttgctgggcagctgtcttaaccaaagtatttttgtatgtgtaaggttgtggtggcctttgtgcaaggttgttgtgatttttgcagtctttgtgatcgttcctcttatcaggtatatgtgcatgagaaccttcttttcatcaccttccctggctccatttgtcctgctacggtgacaccagtcttttagtccatacatttgacttcatgaggagtttgctataatcaattgaatgaagaagaaacatgtggacctgctttataggtaattctgcataatgttctagcatcacctaaaaccggacagctggcacactacagcctcaggctgtggtggccccaaaggagagtggtaaaagaaaatattcccatttgttagaattttgagtagtgtacttcatagtttttttttttcccagaaggaatgatgccagggggatgaatagttttgctggatggtcatggacttcaaagaagcatgattgataattggttgacaaggcaaattgacaatgaggtatgtgagtggactacttttaatgagcagaatataaaattacttgcggcctatttaattgtcaataatcagcaacctcaccagaagatgagcttaataatcaggtgatcaagatggtacattctgtgaatattcttcaagatttttctctagtcaaccatgtccattcccagtgggtgcatgaacagtgtagtcatggtggaagaaatggagcttattagttcagtactatgaaattccatttactaaatccaatctggctacaaccacatttatatggccaagctatcaaaagtatggactaacactggacctcagataggcactgttcttcaaaggggactaccaacctcctgctggaatttgattacaccggaccactttgatcatggaggagacagcactttgttttcagtggaaaagacaattactctagatatgaatttgcctttcctattccaatgtttctgataaaagcatcacatgtggactttacaaaatgttttattttctgccatggaattccacccagcatttcttgtgaccagggcagtcatttttcaaaaaatgaattgtatccattgggctcatgttgatagaattcactaaacttaccatgattcctgttaacagttccatttcagtagtgggacatgcctcaattctcagaagtcctaccatctctgatttgtcttcccatgtttgtttacctaattcctactttaaaatgtccttgtccctaaaatcctagtgattctgcttctctgattgaaccctgactgatattgaaccatttctgctccttttcagacactacccctctctctcaactataatcactttcctaacttctatcaccattgactacttttccttttatctttatatatatgaaaccatattgtatatatccttttgtgtctctgttttgcccaacattatgtttgtgagattgaactatgctgctgttttatagcaattgtttacttattttgttactgtagagcaagtgtaggcacactacatcccatgggtgaaatcttgtatatatttcggggtgcacatgtgtgtgtgtttctgcttgctagaagtggaatttctgtgtcatggagaatacataaatttaactctagcagatactgtgaaacattttccaaagtgattgtaccaatttacactcttacaaggaccgtggtagagttccatctgctccacgtgcttgccaatgtttggtgttgtcagacttaaattatttttaaattattttttaaattcaccattctaattttttaaaagaagtagagtataatgctggttaccaggggctggagtggaggggttgggacatattggtcaaaagatataacatgtcagttatacacgagtaatttttaaaaaatcagtgattctggtatggcaatagagttgtctcattgagggtttaatttatactgctgtaatgactaatgaagttgagcaaacagagcatgtatctgaagccttgtacatttgtatattcttcatatagtgcttactcaagtgatttgttgatttgtctatttggttgtcagtcttattcttgtatttataggatttctttatattctgcttacaagccttttgacatatgtgtgtattgtgattatcttttcaactgtggccagcattttcactttccttatggtacatttgataaacaaccattctcattttaagttttttaattttacttttcagttggtactttaaaaaatcgttgccaacattagagaaggtcacaaagatattttagtagctatttaaaaaaatcttttaattttaagatctatattccatatcatattgatatttacatatgggatgtgctaaaggtcaagattaattatttttctatgtgaagaatatacaatatcctcacttcttaagagatttctccattttattatctttgtcaaatatcaaatgactagatatatgtaaatctgtttctgaactttctattatcttccattagtctattcatatttgcatatatagcacacttttaattactgcaaatacataaaatgtcttgatgtcttatcgcataaacccacctctttctattttcttttgatgttttggttattcttgactgttgcttttgtttacagattttagactcagcttgccagttttcaccaaaaaactgctgagaattttattaaatatatagattattcaaaggagcactgatagctttacaacattgaattgtccagtatctgaatagcaccacatattttaaattttcattgaagtataaatatatgtagaaaaatgtatatgtcatatgtgtcatgattgtttaattttcaacacactcaaaataccagcatctgtatcaagaaactgcacataaccagcatgtggtagccatgaaaatgtatttcacaaatattttaatgcaagtaaccaaagacccctattgttgtgttttaaggtcaatcctgtgtttgcatcaaggccagattttctgaaggctgctgctcccagtcaatatctgagagcagtaaggattctaaggtagacctgttcagggagacatggatcttctctgttggatagataagattgtgaatacctgactttaatggctttttctttaatataacttttctttcttttttttgaaatttagtctcgctctgttatacaggctggagtgcagtggtgcgatctcggctcactgcaacctccacctccagggttcaaaggattctcctgcctcagtctcccaaatagctgggattacagacatgccaccacacccagctaatctttgtatttttagtagagacggtgtttcaccatgttggccaggtgggtcttgaactcctgacctcaggtgatccgcccgccttggcttcccaaagtgctgggttacaggtgtaagccactgcacctggcctaatgtaacttttcttaagctgtatggaagtctagaatgattttatcaaatcttcctttgttgttgtgttgttgttgctgttgttgttgttgagacagggtctcactctgtcacccaggctgaagtgcagtggcacaatcttggctcactgcaacctctgcctccccggctcaagtgatcctccagcctctgcctcccaagtagcagggactacaggcacgtgccaccacacccagttagtttttgtatttttttgtagagacagagtctcactttgttccctgggctgccttttgttctttactcagtgttagatttacatcatggtgcagcttctctcctgttttctctcacaatcatttcccctaataaaattcttacacaactaattctgcctttgcattttttttctttctttcctttttatttttcttatttatttatttttttgagacagagtctcactcttgttgcccaggctggagtgcactggcgagatcttggctcactgcaaactccgtctcctgtgttcaagtgattctcctgcctctgcctcctgagtatctgggattacaggcatgggccaccatgcccggctaattttgtattttttgtagagatgggtttctccatgttggtcaggctggtttcgaaccccgaactcaggtgatcctgcccaccttggcctcccaaagtgctcggattacaggcatgagccacttcgcctggctgcatttttatttctaagaggacctgcattagcacatcaccctaaaaacgttcgtgcccaattcaaattcctacttttctctcaaggtaggcactgttctgatttataatagcatagatttgctttgctattttttatacttcatataaatagaaaaaatatgtacaattttgtgttttatttgtccacattatgtccgtgacatttatccatgctgttggaagtgaatataactggtttactctcattaatatgtattattttaatgtataaatatcacataacttattaattcatttaatcgttgattttgtgtagtttcttgtccttggttattaaaatcagtgcttgtaggctgggtgtggtggctcacacctgtaattccagagctttgggaggctgagatgggcggatcacaagttcaggagttctggatcatcctggccaacatggtgaaaccctgtctctactaaaaatacaaaaattagcttgacttggtggcatgtgcctataatcccagctactcaggaggctgaggcaggagaattgcttgaacccgggagacagaagttgcagggagctgagattgcagcactgcactctagcctgggtgacagggcaaggtttcatctcaaaaaaaaaacataaataaaaaatgaataaaataaaattagtgtttgtataaacataaaaagacatgtcttttgctgaacatatgaatctccttctattgataatatatatataagcatggatctaagggttatacgacagttttagtaatagcactgaaagttttagtggtagcactaaaactactcagcttcagtaattactgcaaaactttattgcaaagtggttgtataaaactacattcctacacgatgcaagtatttgcatttttgtcaacctttctttgactaattcttaattttaacctttatggttggaatgtagtggagttctcataatattttgagtttctttgatgactcaagaacttgagtatctttttatttgattattgagtatttatgtcatcttttctgaactatctgttcagttatttttacatttttctgatttgtttgcctgacttttcttacagattttaggatttacgtattcttatatgctcaggatatgaatcttttgtcacatatatggtttacaaattttctcaatttgagaattaccttttcattttctcattggtgccttaattaagagaagttcttcatttttaaaataatctaagtcacctaattttttaaaaattgtggattattttggtctcatataatatttttttccacttcagggcaacaaacaggttcttttgtttccctaagtgtcattgctttactttccaaaattagatctgcattttttctgaaagttatatttgtgaattctgtgaagtacagacgaatatatattttcccatgtggatatctaattgatgaagaagcacatattaaaaagaatttttataatctgtacagtagcatattcttttcacaaatgaaatgacagtatttactttgatctacactctattctcttcctttatctatatatctttaagcaaatgccacactgatattgtagctttataatatgattagatatctcataaagtaagtcttccattttgttattctttcacattatcttgactattcttagctctcagattttactccaaatttttataatatttgtatcaatttccagaaaaaattctagtatttttattgggtttgcattgatatgatggattactttggtgaagaatattgagatgtttaaaatattaaattgtctatccataaatattatttattataattattttaaaggttttttgtatatgcaggaaaataaaagcagatctttacctaataatatttacatagatttcaaaaggattaaagggcctaaatgggaaaggtaaatgtagaaagttaatttttttaatgtaggagaatattcttgaaacctaggactttcaaaagcacagaaattaaggaaaatgcttattaaatttctctcctcaaaattaaggatgcttattcaatgtgagacacagtatatgaatattaaaatcaagtacaggtgccaagacaattcaatgaaaaaagaacagtctgttcaacaaatagcaaatagtgctaagaaaactggatgtgcacatgaaaaagaatgaagttggaccccctactttacatcatatacaaaaattaacttatagtgggtaaaaggcctaaatgtaacagctaaaactataaacaactagatgaaatcatagatataaatcttcatgaccttgaaataggcaatggtttcttagatatgacatcaaaagcacaaggaacaacaaaaaataaatgaatgaattggaactcatcaaaatgaaaaacttttgtgtatcagtggataccatcgagaaagtgaagacaccaacatgggtgaacgtatttgtaaatcatatatctgatgagacttgtagctagaatacataaataactcttacaattcaacactttagaaagacaaataacccaattaaacaatgggccaaagtatctgaatagacatttttcaaaagaagacatataaatgcccaataggcacatgaaaagatggtcaatgtcataagtcattagggaaacggaaatcaaaacaacaatgagatattgcttagccaccagattggctacagtaaaaaagacagataataaaagggttgccaagggagtggagaaattggaaccctcatacattgttggtgggaatgtaaaatggtgcaatttatttggcaaacagtctggcagtttcccaagggtttaaacatagagttattatatgactcagcattccactcctagatatacaaccaagagaaattaaaacttatgcctacacataagcttgtacataaatgttcaaaacaacattattaataatagccaaaagtagaaacaatccaaaatagccattaatgaataaataagatgtgatgtattcatccaatggcacattatgtagccatgaaaagaaatgaataactggttcatgcaccaacatggatgacccttcaacatgttatgctaagtaaagttcgtttcaaaagaccacgtattgtgtgagtacactgacagaaaatgttcaaaatatgtacatctacagaaagtagattagtgattgcctagggctgaggagtttgggaaaaattggaagtgactgttaatgggtatcaggtatctttttgagattatgtaaatgtcctaaaaattgattgcagtgatagttgcacaactctctggatataataaaattcatttaactgtgctctttaaatgggtaaactgtatccattatatctcaataaagtttctataagaaatatcaaaaaatagctctccctctccctctccctctccctctctccctctcttccctccccctctcccccctccctctcccctccccctctccccctctccctctcccctttgcacggtctccctcccatgccgagctgatacgaggctggactgtactgccgccatctctgctcactgcaacttccctgcctgattctcctgcctcagcctgccgagtgcctgggattgcaggcgtgcgccgccacgcctgactggtttttgtattttttggtggagacggggtttccccctgttggcccccctggtctccagctcctgaccacgagtgatctgccagcctcggcctcccgaggtgctgggattgcagacggagtctcgctcactcagtgctcaatgttgcccaggctggagtgcagtggcgtgatcttggctcgctacaacctccacctcccagccacctgccttggcctcccaaagtgccgagattgcagcctctgcctggccgccaccccatctaggaagtgaggagcgtctctgcctggccgcccattgtctgggatgtgaggagcctctctgcccggctgcccagtctaggaagtgaggagcgcctcttccctgccgtcatcccgtctaggaagtgaggagtgtctctgccgggccgcccatcatctggggtgtggggagcgcctctgccccgccgccccgtctgggatgtgaggagcgcctctgcccggctgcgaccccgtctgggaactgaggagtgtctctgccccgctgccaccctgtctgggaggtgaggagcgtctctgacccgccatcccgtctgagaagtgaggagcccctccgcccggcagccgccccatctgggaagtgaggagcctctccgcccggcagccgccctgtctgggaagtgaggagcatctccgcccggcagccaccccgtccgggaggtggggggcagcccccgcccggccagccaccctgtccgggaggtggggggggcgcctctgccccgccgccccgtctgggaagtgaggagcccctctgcccggccgccaccccgtctgggaggtgtacccaacagctcattgagaacgggccatgatgacgatggcggttttgttgaatagaaaggggggaagtgtggggaaaagaaagagagatcgggttgttactgtgtctgtgtggaaagaagtagacataggagactccattttgttctgtactaagaaaaattcttctgccttgggatgctgttaatctataaccttgcccccaaccccctgctctctgaaacatgtgctgtgtccactaagggttaaatggattaagggcagtgcaagatgtgctttgtgaaacagatgcttgaaggcagcatgctcgttaagagtcatcaccactccctaatctcaagtacccagggacacaaacactgcggaaggcggcagggccctctgcctaggaaaaccagagacctttgttcacatgtttatctgctgaccttccctccactattgtcctatgaccctgccaaatccccctctcggagaaacacccaagaatgatcaataaatactaaaaaaaaataaaaataaaaataaataaattaaaaaaatttaataaaaaacaatcaatacatcaaaaaaagaaatatcaaaaaataccaaatagtaggtattgctgtgtctcaaatgcataaggtattaatattcgtggtatataatccaagtgaacaaggaaaatatagcacccataacagaagaaaagggcataaatatacagtttacagaataggctgtaaagtattttgaagaaatgctcaaacttattaaaaatcagagaaatttgattaaaacagtgaaataccagtatgtgtttaatggagtggcaagacataggatgatggttcatggcaaatgatggtatggaaatgggtggttatacaacaaactgtattcagtgctcatgagaatgtggaatggtttaaccattcaggagagcaatatagctattaatattatttgtaaatgtgtaagtatatgactctgctatgaaccaacaactacacttatggatatgtgtcctaaataaattgtcacacatttctatgaagatgtatagtgatgttcctagcattgttattgccaatggcaatccaggtttctgtcatggaatagtaaaatattttgggtgtaaacaattagttctataaaataggttaatgtatgctagaaacatggatgaatctttaaaacatactgctgagttttgaaagtcttaacatttatttttatgacataataccacttatataaactaaaagtgtgcacacacaaccacatcacatgcactttgcacaaaacacacacaaagagaaacacaacaaacaaaatatggggctgggggaggaaatgaaagtgttccatagggaaaagaaaggaataaataaataataaaattattttgaccaagttgctagatataagcttcagtacaatttgattagaagtggtgatattcagcattttcttcccattctcattctcagagataaattttcaacattttgttaattgttgtgtatgttcattttagttttaagtgggaatttatatttcttaaatgtatcatcataatgttcctcataatattctcaatatatttagtgatgttcccttttacttctgaaactggtaatatgtcatttctgtcttttttgtttactgtcactggactttgtcagttttattgttctatttatagaatgatcattttactttttaagatccactccatttcgttttctatttcatgtatttcctattatcttgatcatttctttccatctacccactgtggttttggtatttgtttattgaattcctgagataaatgtttttatttttttgttcagcttttctcctgttttaggacagatgctcctcaacttacagtgggctcacattctgatgaacttacctaccgtaagttgaaagtatcctaagtcgaaaatgcatttaatacacccaatctaccaaacatcatagcttaggctagcctgccttaaaggtgctcatgacgtttatattagcccccagttgggcaaggttttttgttttgttttgttttgagagggagtctcgctctctcgcccaggctggagtgcaatggctcgatcttggctcactgcaaccgccgcctcgcaggttcaggtgattctcttgcctcagcctccagagtagctgggactacaggtgcgcaccaccacgcccgactaattttcatagttttagtagagacagggttttgccatattctccagggtggtctcaaactcctgacctcaggtgatccaagggcaacgttatctagcaaaaagaagcttatttcataataaagtgttgaatatcatataatttattgaataggtattgaaagggaaaaacagaagggttgtataggtactgtactgaatgtgtgttgctttcacaccatcatgaagtcgaaaaatcttaagtgaaccattgttaactccaggacctgtatatgatttcaaggctttctatgtttccttctaatcatgtattaaaagctctcctgtttatcagtgtttttctccttatgagtctgtcaatcaatttttctttataaagtttgctttacattatgtaaggctgttatagttgatagaaaattttcattactatgaagtgtttctttgtatatcttaaaatgttcttttcttcaaggactattgtactttgtccaatattaatatattttaaaattagagaaagaatatgaggcctaggacgatagtctctttctccattagaatatttttgtttatgtcaggtacctgcaaacactaacagaaaaggtttactttaatctattttcaggtacgaatgtgatttcaagttttgcttcagtcccctagtgaagatgatctatttgccctttatctttactcctgtagtgcagctctttgggttttactaggtacccttctcccgatccccaacttcttccccaaggcccttgaacaacagaatcggtaggtaccaccaagacagacacttccactctaaaattgcaaatcttggctaagatttgctctggctttctaggatacccggaagctcaggttactcggaagtatttccgctccaaggagcggaactatggccggtttcccctggggcattctgggaagtgtagtcaggggcccgcgtagcctggggcacttccgcttttggatggcggagctagggaattgtgggaagtgatccggggtttctctttagttgctgggaagttttttcgctctaggagggcgaaaacaagtgtttggatccgctgggaccctccaagttttctcagcctcgtcagggagcaagcggggccctggccctcgtctggaggaaggctagagaagctgtggccagctgggaggctggagttgggagcagtttgtgttctttcctctcggctgagcctcacgtttggagcagttcttgcgtccccgggttgggagcgtcctggatcggttgtcgcttggttagagggtctcctggcgttccgcagccagcctctcccacctacttgccagctctgccacttactagtgttataacgttttgtgagttaatcttaatctttctctatcccattctcctcattcctgaagtagagtcattagtaggaggtccttgtacttttatacgaattattcattaaatgtccaaaataccgttatgtggtaggtaccacttatgttctaacagagagacgaagataatagacctctccacacaatgtagaaaagaaagctgtcttattactgaataaggacaaccactgtatagtattgtaggcaatctaaagaaaaatattattaaaaaattccgccctatgtgtacagtcaagcagttttaaactttttatacaattctacttttgaccactatgtacatcagttctcaagattaatgatttttcaataagaggacttggtctcatcatttactgcaaattcttttataaatttattctaaatttacttgagaatccagtgttagttaactaactttatcgaaagtaataaaacttctcttacctcatctgctagccgatttacagtttaaagagaggcaccttggttaaactcttgcagtgatagggacagtgggttgttattttctcagatgtttatattcaaaagggacaaatctcagaactttcacaaatacttctaggttgtaaacctggctagaggcttacatagccgctaatgaaatttacatgcgtatcaaaaggttagagaaaggattcagaagcactaggtttcttatggaaatgctctaagaaaaagaagagggaagacgaaccctaaaacgtacagttagtaagaggcagaacgtccatatgaacccaagaagttggagcctcaagtctgtgttcatattctccacgctgtacatttttcttagaaccatatgaaataatcgtgtatatggtttgtggaagtctttttctatcaggtttggaaggtgatctggggctttagagtctatattctccttatagaaataatgcatgaccattatagagagattagaaaatacagaaatgtataaaaggaaatgaaagttacccatattcactgctgtatatttaaacaattagctgggtgtggtggcacataccgatagtcccagctacttgggaggctgaggtgggaggatcgcttgagctcaggagtttgaagctgcagtgagctatgaccacggcactgcactccagcttggatgacagcgagaccccgttcctttaacccataatctcaggatttagagataaccactgctaacattttaaatgcatttatgcattggtgccataccacccacatggtatttctctaatttttcttgtagaaattcccaaacatgcacatacagaaaatagtgttaatgacccccaccccgccatcatttgtctttaactcttgtaaacattttgtctatcttattgcatctattactcttctcccacatatgtttttggtgggaagaggaggaatttgactatttaaaatcaaaaccaaatcctagtcagtcggtagaaattaaaagtaattaacataaagtaattatgaatgaagagcaaaggaaagcaaataacttcagggttttctttcctggcaactaggaggaaggtagttatgtgaaaaacctaaaggagagggaatcattgagatttggaaaggaatagttatgaatttggcttctttatttggaatgttttactcagggtc[364 bp omitted]gctgcatgttactttgttgcaggaactatgtcccattctttaccatgtgcttagcacccagcacaagactggtaaggaggggtttagtgtttgtggtttgtggagctgcccagtatcttgaaatggaaacctgcagatcatttagattgtattcagaattcccaaaatggatttaggaaaaaataaaaggaaataatgtcaatattagtgactctttatctcacttttggtgggatgcatttgcatagtcttctagtttttttcccagtaatcaaaagttgatgcatggttattgataatattttagtgatcaaagcaaatttttgtagaaaccttccatccataatttatgtgtcctgtgtttatcccctgaggttaacatttgctaactttttatagggtagtcatgaatcaggcagaatttccagtgttttacatgtatttattcatttgtacttgatatcaaccctattatagtctccattttacaaatgaagaaaaaggggacagaagaaatggaagcactagtattttaatctagatagctttatactaaggctgtaatattagctactacacactacttttattagtctacaaggcaagaacccacagtaagtcttattagagcagggaatatttaagctatggatgaagaccgtcacccaggagggaaaagagtagcaggttatgacagaaggaacaccaaatacaaagaattagaggctttttgtaggagtacaagtaatccactatggctggacatgtagagtggaaagtggattccaagagagaaacagcatctggaaaattcctgtttgtgcgacttgttaaagcatttgaaccttctcttaagggcactggatagacatgcaggtgaaaataatcaaatttccatcttaggagatatacttaacctctctctgcctctggatcccaaagagtaaactagaggacattatttgttttaaaaaagttgtgaaaatgggctaagtgtggtggctcatgcctgtaatcctagcactttgggaggccggggcgggtggatcacctgaggtcaggaattcaagactagcctggccaagatggcaaaaccccgtctctactaaaaatacaaaaattagctgggcgtggtggggaggggggtgcctataaccccagcgacttgggaggctgaggcaggagacttgcttgaaccttgtgtgagggcggaggttgcaatgagccgaggtcatgccacttcactccagcctgggcaaaagagccaaactctgtctaacaacaacaacaacaacaacaacaacaaaacagaacaaaaaaaaaaagaaaaaagttgtgaaaatgtagtgagggtcccatagtctgaatagtttgaactagttcctggcacatacttggttctttataagagatagttgtatataacagaataaagaatatatatttagtaaatgagaactgcaaacatgtactgtagtagatatgtggatatttttaggtattgctctcttctttcaaccctcaattcttggaaacatcaattccattatacatttaagcaaataaagatcaaggtttaaacactgaagtaataaatttgttcatctttcaaattcagaaactccttgaggaatgattacagaggccctagttgctttgtggagttgatctaccatatgccaaagcttgtgttttctatgtctagctatcctcagtaagcaagttgttctgaattatatgactgtgctattaagaaaagtggaaatccataatatattctgccttcgttgcattttttgattgctctttcattcttttagtatctaaagagtagtttttctattagtcgatcctgttaaatgtaaaaacttaaagggtttcctctgccctttttttttttttttttggaagtggtgggtataattctattagtacaggatcacgtgatctgtttcttataatagttttttttttcttttttttttttttgagacagagtctcactctgtcgcccaggctggagtgcagtggcacgatcttggctcactgcaccctccagggttcaagcgattcttatgcctcagcctcccaagtagctgggactacaggcgcgcgccaccacgcccggctaatttttatatttttagtagagacggggcttcatcatattggccaagctggtctggaactcctgacctcgtgatccgcccgcctcggcctcccaaagtgctgggagtctttttttattttagggctccaattcttcacatatttgctgttactttttgttaataagaaaaacctaaattccactgacatcagagaactgcttcagcctggctaaacagcaataagccgtgaagaggattctggatgttgtagtccgggagctccgagaattttgtcacactctccgtaaccctctctcactcgctcgctccgtttttttttttgtttttttttttttcaagcgcgaagagggcggcacctggatggtttttccttctggaagttctgggaaacgtattccagaactctgtccggaaacaattgggccgcaggagcgcgggccttctgggaagggtagttcaggagctctgggcaggcagagccacttccgccccggaaagcgaggccgccaccatcttttgggtccgggaggtgagtcagccctgcacccccacgacccctcttgaaccttttcagcctgtgcttgggaataggcgctccccagccatcagtcttgggatggagaggtcgcggccgcggcggaggccgagaggccgagggcgggaagtttgctctcctcccgcacttggcaagcagcgccgctagttctgtgggtataataaacagcgagttacctatgatccgcgctcctgtttcctcatctttaaaatagcaataaagatagtcgttactgtgtagggttgtaattagaattaaacaagataatacgggtcaaaccttagaacagtggtggcacctgatactgggttggctcctgctattgatacagtgattccctcacaagcgccctttttactggaagctccagtgaagagagaagaaaagtcagggctttatgccatggcctttctgtcgtatccttcaggagaccgagctcttcccgaacttttacagatcttttttttttttaagaaggattgagtcatcgggctccaatgcgtggggatgtttaccgccgtttatccgggatagagactccatcgtgctgacagcatccttttattcaccgcctccgaatttgcaaagaggaggaaggagggacttcttggcttctcccagcatagccccaggtacctgctcttgaacgcactttgttgttccattttctgtcctttcagttaatcaagtttccgtcactcagtaagttactactgaaaaatgatgaaatatttgttgaataaatgtgagagtgggtaggaaaactacttggaaatgagtattaccaataacatcttaccactttgattttaaggcattcgtctgtggaccatagctattgatgaagtaggtcttgttattttgttatgaggaaattaggcagagtttatgttattaaatactttcccgaagttattcaactgatagtaagaggtggatttgggattgaacccaagcattccttttcagactgtgtgatcttttttgtttgtttttgtttctttggtttttgttgttgtttattttctattcctttttctgagtctgtggtcttaatctcaatgatacagtcgtcttcagttatcttaaatagtaatccatatggctaccggtgagtcgttggaaatcagccttgggaatgtaggtatggattttactgtggaagacctcaaaaactgcactgatgaattttgaattttttagaaaaatcctgcaacatctcacttacttaatttcattccatgtcaaaatatgtcatattctagttatagaagtaatgaatgctcattatagagatgcactatccaatccagtagctataagccatgtgtgccctaggagcacttgaaatgtgtctagtccaaattgagatgtgctgtaagtgttaaatacacactggatttcaaaaactttgtacaaaaaatgtaagatggctcattgataattttttgtattatatgtcaaaatggtaatattttggatacattggcttaaattatgttgttgaaattaacttcacctatttttgtttttgtttttttgccttttttatatgttactgctagaaaatttaaaattatttatgtgtctcagtatatttctattggacagtgatgttatattcagaaaacttaaattacttataataaaactgctaacactttaatgtgtttccctttagtatatgctatggatgtttctcaaaataggtttggtattctgtgtagtagtttttttcttattatgaaaattttcttttttctttttttttctttttttttgtgagatggagattcactcttgttgcccaggctggagtgcagtggcgtgatctcagctcactgcaacctccacctcccaggttcaagtgattctcctgcat[133 bp omitted]tcggcctcccaaagtgctgggattaccggcgtgagccactgcgcccagccgaaaaatttcaagcatattcaactgtcaaaagagtggtgcagtgaattccacgtaaccaacactcaggttcaacatttgctgcagaccatctcctcctccttccaccccacttttttttttttttttaaattagagtgtcttaaagcaggagtcccaacttctgggcagcggacctggtactagtctgtggcctgttaggaacctgacagcacagaaggaggtgattggaggggtaccgcctgagctctgcctcctgccagatcagcaggggcattagattctcataggagggactgcacatgtgaaggatctaggttgtgcgctccttatgagaatgtaactaatgcctcatgatttgaggtggaacctatcatccccaaaccatctcccccgcccccatccgtggaaaaattatcttccgtgaaactggtccctggtgccaaaaaggctgcagatggttgtcttaaagcatacgccagacatcaggtcagttttttttttttttttgaaacggagtctcgcctgtcgcccagaccggagtgcagtggcgccatctcggttcactgcagcctctgcctcccgggttcaagcgattctcctgcctcagcctcccgagtagctgaggtcagttttttttttattttctaccatgacctctgaaactgaagctgtaatttgccatttgctcagtacagtatatcttttttttgttctttttctttcaaacttttttgtcattatgttttcgtagtgtcttttagaatatatatgtataatttttttttttttagtgcagtctgggataatttgcttttactatctgtgtgtatattttgttctcctttcttgtctttttttgttcagtttattcccttttatttgtgctcaactggtctggagtttatatggttttgtgtcattcttctaactttaaaaatattctctttcttagcaaatactaaacttaatcagcatgtgttcttattctgaagaatattgagactaaaaaaaatctgaaagaagatggggccaggtgcggtggctcatgcctgtaatcccagcacttggggaggcctaggcgggtggatcacctgaagtcaggagtttgagaccagcctggccagcatgatgaaaccccgtctgtactaaaaacacaaaaattagccagacgtggtggtgcgtacctgtaatcccagctactcaggaggctgaggtgggagaatcgcttgaacctgggaggcagaggttgcagtgagctgagattgtgccattgcactccagcctgggtgacaagagcgaaactctctctctaaaaaaaaaaaaaaaaaaaaagatgtacctttaaaaaaaaaaaaaaaaaagctatgtttttataggtctactttttattataaccaccctcaaaatttgtcattatagttctttggctttttttaaacaaagattattatattaccaatatagtcacaaatgttttcttaccattgctttttgcagtccatcttttagggttcacatggttataaattctcttcattttttttttcagctaaaatattgtttctttctcatgtaaataatcatctagttgaacatagaattcaggttgacagtttctttattttggaggtaatattcatttgttttaaatctccattctgttaccctatttctgtcaatctaattgttatttcttttaggtcaactatattttctttctaggagctttaaggttgttgtttccagttctttatgttcgtttagtcttttgcatttctgagttttattgtgatttgtttagggtatgtttatttttatttatactgtttagaatttctatatgcgaacttgtatcttttaccaattgtgtgaaattctcagcaattgcatcttgaaattaaaacctctcagtcattccctccatcctgccttctcttctcccattcctgttagacaaatacggaagcctctcaatttatctttcatgtttcttgatttttcgtttgtgctttatctttctctttgctgtgtgtttttctctgtgcacataaaataaaagagatgtaccaatgatcgtttccaggcttcatgaagtaaattgacccagaatgatacgttttagaaaactgataacagtgtcagtaaaatattactagctgggcaacaaattactaaaaagaaaccttaagtcagatttcggcttttcagaaattaaaggtgactttcatag[135 bp omitted]cctccaccttccaggttctagcaattctcatgcctcagcctcccaagtagctgggattacagacccgcaccaccacgcctggctgattttttttatttttggtagagatgaggttttgccgtgttggccaggctggtctcaaacttctgaccttatgtgatcctccctccttggcctcctaaagtgctgggattacaagcatgagccactgtgccaggcctggctaaacagcaagaagccatgaagaagcttttttgtaactataagagaaagggactcctggttcttagaactctccatctacttatttaatccttggaaaaaccctatgagggaggtacgatttatgattcttaccatatcctcattgtacacataacagaagtgaggcacagagagggtttttaatatccccaaggttacacagctggtaagtatcatttctaggaattaaacccagatacttgacttgagagccctcatatgttgttacattgcctctcgtttcctgctgtctctgccatcagaaatccttgtagcaaggatgctgcacttgtgcagactgttcactgcccaatggcactgaactatcatgccatttagtagctggaatacagtccatgttctgcttaccaagctgtatgtggctatacctgtctgaatgtagggctatttctctaatttcctcatatgtacacatgggctaacagcaggcttgtgtctcatggcgtctttggtctcccccagttatgccatctcagaactatgaccttccccagaagaagcaggagaaaatgaccaagtttcaggtacgtaaaggattccttgctgtcttttaaaatgtgatttatttctcaaagataacagatttattttttctctttcttggaaaggttagtgggaaacagatattcaggacatgtggtatgctgacatgtatgtgtttttttgttttagtttatcacctttactattttacaaaacagtgtttgaaaaaataatagaagctttaatcagaaataatctatgctactaccctgcttatgaactagcttttttcattttcccatgttcctttttcatacacattttgcaatacttgagtagatgaaattttcaattgtgcattctccacttaattgcatcacctgcattgtaagtgagtacatcatatgccattgaattgcagtgcccttaaaagacaacaaaaactatttcttatttagcctttcagaaattcagaaattttaagaattttactactttaaagtaaatccagtgacttttttccctacatataaaaacaattccttcaaaagaaattctggtggaattcaatattatttgtccttaaagttttaggaactctgcattgaagaggtttatgtctcagtttcatgtcagttccctcaggtgttttgtaaacagaacatctaaagaatgacatggtgtaattttattagatgctttcagagaagaagagctatatatttttcccgtttatgtttttatcactcatttatttcttgtatgaatttatttcatcaaagtaactacatgtacgtaaggtctagtagtacttagatgtcttgctagccctttccatctgtcattgcatttttcagatgtgaggatggagatgatttatttgcattttaaatatgaagaaacaggttatgggaacattttataactgccccaaatttcccaggtagctgactcattggacactgaagcttccaactattaggaatatctggcattctattttcatgtaaaggcagacagaacaaaagagttttccattcacagagatgagcacatatgatagaagtacctgatgttacctttttattcttttgagacagagtttaattcttgtcacccaggccggagtgcaatggcatgttcttagctcactgcaacctctgcctcccaggttcaagcgattctcctgcctcagcctcccaagtagctgggattacaggcatgtaccagcacgcctggctaattttgtatttttattagagacggggtttcaccacgttggccaggctggtcttcaactcctgacctcagatgatccacccacttcggcctcccaaagtgctgggattataggcgtgaaccagtgcacctggccctgatattaccttttggaggatagaccccaacaatgcccctcatccagtttccatctcaattactgtctcttctctagttttgtctcttagtcattccatgaacgtagatgctcaagcacagtttttatgtaagtgttttaaatttccctacagcaaaagctatcaggtatgatggtaagagacagcagcaaaccggtggcatatacttaaacattaggtaaaggtctaatagcttaaattcctgttaagattagtaatatagagaaaattccaactggaatatgagcaaaagaaatgaataggagtgtcataaagaaaagaaatttatgaaaaaaacttcactaataatttaaatgtgtgaaaatgttaataaaatagctttctatttatatattggttttacttatattgtcaatgacttttttagaaaaaggaactgagtcctatttagccggggtctagagattcaggaatgcttgtactgttgcatgaagagtgaactgggaaaatctttggagaggaaaatctgccattacgctttcaaaacttttttttttggatgttgattttcttttatttatttatttatttatttatttattattattatactttaagttttagggtacatgtgcacaatgtgcaggtttgttacatatgtatacatgtgccatgttggtgtgctgcacccattaactcgtcatttagcattaggtatatctcctaatgctatccctccccactccccccaccccacaacagtccctggagtgtgatgttccccttcctgtgtccatgtgttctcattgttcaattcccacctatgagtgagaacatgcagcgtttggttttttgtccttgcgatagtttgctgagaatgatggtttccagtttcatccatgtccctacaaaggacatgaactcatccttttttatggctgcatagtattccatggtgtatatgtgccacattttcttaatccatctatcgttgttggacatttgggttggttccaagtctttgctattgtgaatagtgccagaattaacatatgtgtgcatgtgtctttatagcagcatgatttataatcctttgggtatatacccagtaatgggatggctgggtcaaatggtatttctagttctagatccctgaggaattgccacactgacttccacaatggttgaactagtttacagtcccaccaacagtgtaaaagtgttgctatttctccacatcctctccagcacctgttgtttcctttttttttttaactttaaaaaaatgttaatagaaaaaaaatgcccagataaagataccgatcacagtatccacatctatacaatgattgatccagctgtggccctcccctctcacccagccccatgtggcttcctttgaaactgcagactggagatgacagtggtgaattctagtcctactcactggatatcagcatttcttttttttaaaattttattattattaaactaagttttagggtacatgtgcacaatgtgcaggttagttacatatgtatacatgtgccatgctggtgtgctgcacccattaactcgtcatttagcattaggtatatctgctaatgctatccctcccgcctcccccaaccccacaacagtccccagagtgtgatgttccccttcctgtgtccatgtgttctcattgttcagttcccacctatgagtgagaacatgtggtgtttggtttttcgtccttgcgatagtactgagaatgatgatttccaatttcatccatgtccctacaaaggacatgaactcatccttttttatggctgcatagtattccatggtgtatatgtgccacattttcttaatccagtctatcattgttggacatttgggttggttccaagtctttgctattgtgaatagtgctgcaataaacatacgtgtgcatgtgtctttatagcagcatgatttataatccgttgggtatacacccagtagccataaaaaatgatgagttcatgtcctttgtagggacatgaacatacatgtgcatgtgtcttcatagcagcatgatttatagtcctttgggtatatacccagtaatgggatggctgggtcaaatggtatttctagttctagatccctgaggaatcgccacactgacttccacaatggttgaactagtttacagtcgcaccagcagtgtaaaagtgttcctgtttctccacatcctctccagcacctgttgtttcctgactttttaatggttgccattctaactggtgtgagatggtatctcattgtggttttgatttgcatttccctgatggccagtgatggtgagcattttttcatgtggtttttggctgcataaatgttttcttttgagaagtgtctgttcatgtccttcgcccactttttgatggggttgtttgcttttttcttgtaaatttgtttgagttcattgtagattctggatattagccctttgtcagatgagtaggttgcaaaaattttctcccattttgtaggttgcctgtccactctgatggtagtttcttttgctgtgcagaagctctttagtttaattagatcccatttgtcaattttggcttttgttgccattgcttttagtgttttagacatgaagtccttgcccatgcctatgtcctgaatggtaatgcctaggttttcttctagggtttttatggttttaggtctaatgtttaagtctttaatccatcttgaattaatttttgtataaagtgtaaggaagggatccagtttcagctttctacatatggctaaccagttttcccagcatcatttattaaatagggaatcctttccccattgcttgtttttctcaggtttgtcaaagatcagatagttgtagatctgtggcgttatttctgagggctctgttctgttccattgatctatatctctgttttggtaccagtaccatgctgttttggttactgtagccttgtagtatagtttgaagtcaggtagcatgatgcctccagctttgttcttttggcctaggattgacttggcgatgtgggctcttttttggttccatatgaactttacagtagttttttcctattctgtgaagaaagtcattggtagcttgatggggatggcattgaatctataaattaccttgggcagtatggacattttcacgatattgattcttcctacccatgagcatggaatgttcttccatttgtttgtatcctcttttatttcatcgagcagtggtttgtagttctccttgaagaggtccttcacatcccttgtaagttggattcctaggtattttattctctttgaagcaattgtgaatgggagttcactcatgatttggctctctgtttgtctgttattggtgtataagaatgcttgtgatttttgtacattgactttgtatcctgagactttgctgaagttgcttatcagcttaaggagattttgggctgagacaatggggttttctagatatacaatcatgtcatctgcaaacagggacaatttgacttcctcttttcctaattgaataccctttatttccttctcctgcctgattgccctggccagaacttccaacactatgttgaataggagtggtgagagagggcacccctgtcttgtgccagttttcaaagggaatgcttccagtttttgcccattcagtatgatattggctgtgggtttgtcatagatagctcttattattttgagatatgtcccatcaatacctaatttattgagagtttttagcatgaagggttgttgaattttgtcaaaggccttttctgcatctattgagataatcatgtggtttttgtctttgggtttctttatatgctgtattacatttattgatttgcgtatgttgaaccagccttgcatcccagggatgaagcccacttgatcatggtggataagctttttgatgtgctgctggatttggtttgccagtattttattgaggatttttacatcaatgttcatcaaggatattggtctaaaattctcttttttggttgtgtctctgcctggctttggtatcaggatgatgctagcctcataaaatgagttagggaggattccctctttttctattgattggaatagtttcagaaggaatggtaccagctcctccttgtacctctggtagaattctgctgtgaatccatctggtcctggactctttttggttggtaagctattgattattgccacaatttcagagcctgttattggtctattcagagattcaacttcttcctggtttagtcttgggagggtgtatgtgttgaggaatttatccatttcttctagattttctaatttatttgcgtagaggtgtttgtagtattctctgatggtagtttgtatttctgtgggatcagtggtgatatcccatttatcattttttattgggtctatttgattcttctctctttttttctttattagtcttgctagcggtctatcaattttgttgatcttttcaaaaaaccagctcctggattcattaattttttgaagggttttttgtgtctctatttccttcagttctgctctgattttagttatttcttgccttctgctagcttttgaatgtgttagctcttgcttttctagttcttttaattgtgatgttagggtgtcagttttggatctttcctgctttctcttgtgggcatttagtgctataaatttccctctacacactgctttgaatgcgtcccagagattctggtatgttgttctttgaaaccaatgagaacaaagacacatctttatttctgccttcattttgttatatacccagtagtcattcaggagcaggttgttcagtttccatgtagttgagcagttttgagtgagtttcttaatcctgagttctagtttgattacactgtggtctgagagacagacagtttgttataatttctgttcttttacatttgctgaggagagctttacttccaactatgtggtcaattttggaatagttgtggtgtggtgctgaaaaaaatgtatattctgttgatttggggtggagagttctgtagatgtctattaggtccacttggtgcagagctgagttcaattcctgggtatccttgttaactttctgtctcgttgatctgtctgatgctgacagtggggtgttaaagtcccccattattattgtgtgggtgtctaagtctctttgtaggtcactcaggacttgctttatcaatctgggtgctcctgtattaggtgcatatatatttaggatagttagctcttgttgaattgatccctttaccattatgtaatggccttctttgtctcttttgatctttgttggtttaaagtctgttttatcagagacaaggattgcaacccctgccttttttttgttttccatttgcttggtagatcttcctccatccttttattttgagcctatgtgtgtctctgcacgtgagatgggtttcctgaatacagcacactgatgggtcttgactctttatccaatttgccagtctatgtcttttaattggtgcatttagcccatttacatttaaagttaatattgttatgtgtgaattttgtcctgtcattttgatgttagctggttattttgctcgttagttgatgcagtttcttcctagccttgatggtctttacattttggcatgattttgcagtggctggtactggttgttcctttccatgtttagtgcttccttcaggaggtcttttagggcaggcctggtggtgacaaaatctctcagcatttgcttgtctgtaaagtattttatttctccttcacttatgaagcttagtttggctggatatgaaattctgggttgaaaattcttttctttaagaatgttgaatattggcccccactctcttctggcttgtagagtttctgccgagagatccgctgttagtctgatgggcttccctttgtgggtaacctgacctttctctctggctgcccttaacattttttccttcatttcaactttggtgaatctgacaattatgtgtcttggagttgctcttctcgaggagtatctttgtggcgttctctgtatttcctgaatctgaatgttggcctgccttgctagattggggaagttctcttggataatatcctgcagagtgtttccaacttggttccattctccccgtcactttcaggtacaccaatcagacgtagatctggtcttttcacatagtcccatatttcttggaggctttgttcgtttctttttattcttttttctctgaacttccgttctcgcttcatttcattcatttcatcttccatcactgataccctttcttccagttgatcgcatcggctcctgaggcttctgcattcttcatgtagttctcgagccttggctttcagctccatcagctcctttaagcacttctctgtattggttattctagttatacatttgtctaaatttttttcaaagtttttaacttctttgccatttgtttgaatttcctcctgaagctcggagtagtttgatcgtctgaagccttctctcaactcgtcaaagtcattctccatccagctttgttccattgctggtgaggagctgcattcctttggaggaggagaggcgctctgctttttagagtttccagtttttctgctctgttttttccccatctttatggttttatctagttttggtctttgatgctggtgatgtacagatgggtttttggtgtggatgtcctttctgtttgttagtgttccttctaacagacaggaccctcagctgcaggtctgttggagtttgctagaggtccactccagaccctttttgcctgggtatcagcagcggtggctgcagaacagcggtggctgtagaacagcagatattggtgatctgcaaatgctgctgcctgattgttcctctggaagttttgtctcagaggagtactcagctgtgtgaggtgtcagtctgcccctactgggggggtgtctcccagttaggctgcttggaggtcaaggacccacttcaggaggcagtctgccggatctcagatctccagctgcatgctgggagaaccactactctgttcaaagctgtcagacagggacatttaagtctgcagaggttattgctgtctttttgtttgtgccctgcccctagaggtggagcctacagaggcaggcaggcctccttgagctgtggtgggctccacccagttcgagcttccaggctgctttgtttacctaatcaagcctgggcaatggcaggcgccctcccccagcctcgctgcctccttgcagtttgatctcagactgctgtgctagcaatcagcgagactctgtgggcgtaggaccctccgagccatgtgcaggatataatctcctggtgtgccgttttttaagtccattggaaaagcgcagtattagggtgggagtgacctgattttccaggtgccgtctgtcacccctttctttgactaggaaagggaactccttgaccccttgtgcttcccaagtgaggcaatgcctcaccctgctttggctcacacccagtgtgctgcacccactgccctgcgcccactgtctggcactccctagtgagatgaacccagtacctcagatggaaatgcagaaatcacccgtcttctgcattgctcatgctgggagctgtagaccggagctgttcctattcagccatcttggctccacccctcaaaacttttaaagtaaatattctatgactttgcagttgctacttcttggccatgagctctgtaaaaggatctttgtagtattggttataagtaaaaatctgtaattaattgtacattatttggattggttagagataaatcttcagttccaaggaatcctgttgtatgtagtcacaaaataggacaaaagagatgataaagatatgcgttgttcgagtttattgagcatgtatggtgtgctaggcacttctaagtgcttgacatatattcattcatctgatcctttcaaacactttatgatctatttattttaattctaaaaatttatttattttaagacagtgtctcacccctgtcacccaggctggagtgcagtggcgccatcttggctcactgcaacctccgcttcccaggttcaagtgattctcctgcctc[133 bp omitted]cctcggcctcccaaagtgctggcattacaggtgtgagccactgtgcctagcctgaaaatttatttttaaaaattgagacagggtctcactctgttgcccaggctgaagtgcagtggcacaatcatggctcactgcaccgtcaaactcctgggctgaagtgatccttctgtgtcaggctcatacaccttataatttagatacaatgataaagaagaggaaattcagttagtgagagattaaggaatttgcccaaggtcctataactagtaaaaggcaaaaccttgaaatttgaacctggccagactccagagccagtgctttaaattaagcagctgtgcatcctgtagtaggtggatgtgacatgtgccttgaaagcacaggaagagctatatacctgtccagggggttgctgaaggcctgtgaactttgcaaacgttaaaaacaatgatagggccaggctcagtggctcacacctataatcacagcactttgggaggccaaggcgggcagatcattggaggtcaggagtttgagaccagcctggccaacatggtgaaaccccgtctctactaaataaatacaaaaattagccgggcatggtagtagacgcctgtaatcccacctacttgggaggctaaggcaggagaatctcttgaacccgggaggcggaggttgcagtgagcagagattgcgccactgctccagcacgggtgacagagtgagactccatctcaaaaaagaaaaaaacaaaaaacagtgataaactacaggctttatggggatgagcgtaggagatagtgagacagggaaaactgtaacagctgaaaattgactgagatctcttggaatctataacaacttttttgtggtgctcttttccttcttgatgccacccttcttctagtgaaggttggttgtaagattgaggttacatgtgtttgatattgtaggaggctgtgacattcaaggatgtggctgtggtcttctccagggaggaactgcgactgctcgatcttacccagaggaagctgtaccgagatgtcatggtggagaacttcaagaacctggttgcagtgggtgaggacaggcactctctgaccctgaacttcagttcccttgagaatctctttgctctcaggtgtttaagggtttggaccttttaaaatggttctttgctcttgaagacaaaaggttttctaatccctgggaaaacaggataggtttttctggtctttctgctcaggcaaaattctgtccttttaaattgctggttctcaaccatgggtgatttcgcccccagaagatatttggcaatgtctggaaatggttgtcacacctgacagaggggtgctattggcattttgtgggtagtatccaggaattctgcaaaatctcctacagtgcacaggacagtgcccccaacagagaattggccagtccaaaatagtagtgctgcagttgcaaaaccctgttttaaatgaaccgtaaatggacacattagcttctatgctttatctttcaaatacgttgtctttcaaatgaaacccatcaatgcattaacttagtgcactgtactggcttttttttcaatgaaataaaacagataaggatagaaaatatcagagcttcttatcaggaactgctcacattgcaacaaaaactgacaattttcagtgaatggtgtgagatacagcattgcaaatgtgatgaaaacagacattagccaagtataacttgagagagagatatattatatatatatgaactaggctacaacctaaatttcttattatagttcatgatcttaaaacatcttaaaataaatcactctagaggccgggcatggtggcttacgcctttaattgcagcaatacgggaggccagggtgggtggatcacttgaggtcacgagttcaagaccatcctggccaacatggtgaaaccccatctctactaaaaatgcaaaaattagccgggtgtggtggcaggtgcctgtaatcccaactactcgggaggctgaggcaggagacttgcttgaaccctggaggcagaggttgcagtgagccgagattgtgccattgcacttcagcctgggcgatagagtgagactctgtctcaaaataaataaataaaataataaaatatcactatagaggttgtgaggcttatagggttcagacaaaaatgtgttttagttgtgtgttcatcttaaatacataaaaatctacattttcatagggcatcttcccttccaaccagatatggtatcccaattggaagcagaagaaaagctttggatgatggaaacagaaacccaaagaagtaggtattctggtgagaaccctgtgtctgttctttcaggtactggttagtctgcatcttaccatgtccatgacctccctggtctgagtgttaaaatctttcacctggattataacaatagcttccatgctggtctccccacctcctcccttgtgctcctataatctgctttctaaatggtagccggagtggttctttttttaatctttatttttttgagacagggtctcaccctgtcacccaggctggagtgcagcagcatgattgtagctcactgcagcctcaacctcctgatttcaagtggtcctcccacctcagcctcctaagtagctaggactataggtatatatcatgatacctggctaattttttattttttgtagagatgaggtcttgctgtgttgcccaggctggtctcaaactcctggactcaagcagtcttcccacctcggcctcccaaagtgctgggattacagatgtgagttgccgcacccggcccagaatggttctttaaagaacacatgagatgatgttattcctctgctcagaagccttcacaaccttcccatttcactcaaagtccttgtactgaactgcaagaccctacctggtctcatctcaccaagtttctctttgatctcccattcctttccctttgcttagatcatttcagccatgctggccgccgttggagtatttgttaagcataccaagttcccttctcttccatggcttctaattagctctcctcattgccttggtggagaggctccccagcaccttacttactgcactcaggtcattcctcaaatgttatatcattagagaggccttctatgtttaaatttaccattttaatttaaaataccatcttccttccattttccatccccttacctttcctttctctccttctttgctttctcttgaatttgcatattcctcaggtctattgacttaaaaattaaaagtaagctgggtatggtggtacatacctgtaatcctggctacatgggaggctgaagtgagaggatcacttgagctgaagagttccagaccaacctgggcaacatagtgagactccatctctacaaaaaaaaaaaaaaaaaaatatatatatatatatatatatatatatcttagccaggcatgttagcatacatctgtagtcccagctacttgggaggagcatcaagtgagcccaggaatttgagaccaacctggacaacatagtgagaccttgtctcccacacacacaaaattaaaagtaaaaattagatattcctagatgatgtgaattttttttttttttgagaccgagtcttgcttgctctgtcacctaggctggaaagcagtggtgccatcttggctcactgcaacctctgcctcccgggttcaagtgattgtcctgcctcagcctccgaagttactgggattacaggtgaccaccaccatgcccaactaatttttgtatttttaatagagatggggtttcaccatgttggccaggctggtattgaagttctgatcttacccactttggcctcccaaaagtgtcacccaggctggagtgcagtggcatgatcttggctcactgcaaccttcgcctcctgggttcaagcaattctgctttagcctcccgagtagctgggattacaggcgcctgccaccacacccggctaatttttgtatttttagtagagatggggtttcaccatgttggccaggctggtctcgaactcctgagatcgtggtccacctgtctcagcctcccaaaatgctgggattacaggcatgaaccaccatgctcagccaaagggtttgtttttataagaattcttaacaaaaaacttacagagaatggagacaagtagatatcacatcccttttactcagagttagctcatagattgagagcacaccagtgtgattaattatttgggaacactgtcttctagtgaatgtctaacataattagtaatttctaagacatttttggacatgtaaatattcaaacctactaaccttagaagataaaagctattcacagttgttggaatgtagaacttcactatcaaaaattatcagtggcaatatggcaggtattatagttcatcagtttccctgtatcaatttcaagttggctttactcattggtgaaaactgccttatccatacagctgacttcccactttcccatttccccttccctctaataccaaaacagttatataacctacatacagtagttctttagcagttttgaattggacatttccagaagtccagaggcactgacatacctgtggagttgaggtgagtcctgattaggcaaagaaaattccagaatttctaaattgggtttccagtgtaatttgcatccacatgtattaatcttagcttctagcaccagcaatgtgagaagcactttacatgttgcagtgacttctgacaccaaacacctgaagttaggccggactttcagagtaagggcatagttttccacaagactgctctctatatcgctctaagtttatatatcgctctaagtttagggattcccagataattttgctcacctctgaccaagtagctacaaatttgggagttcccgtgataatttgttagaatgactgacagaactcgggaaggtgctggacttacagttttattatagcaaaaaagatacatgttggaagcagcaaaagggagagatatatagggtgaaatctgggtggcttccctctttcttcccttttgtaaggacttgtgattactttaggctcattggataatctaggataatctccttaagagctttcatttaatcatatctataaattgcttgtttttttgttttttttttttgtagacggagtcatgctccgtcgtccaggctaaagtgcagtggtgcaatcttggctcactgcaacctctgccttctgggatcaagcgattctcatatctcagcttccctagtagcttacaggtgcctgccaccatgccaggctaattgtttttttagttttttagcggagacggggtttcaccatgttgtgggccaggctggtctcgaactcctgacctcaagtgatccacctgcctcggcctcacaaagtgctgggattacaggtgtgagccactgtgcctggcctgtaaattcctttttgccatgtacattaactattcacaggtttgagagttcaggctgtggacatctcttgggggtggggtgtcattactcagcctgccatatccagaaatgtgtagacacctgttgctatttttttttcagtttgtattattagaatgtaacatttcatttaggcaaattatttgattaggacttggtaaaccaccccctaaacattttaagccaaggtctttcatacgtttctaaccatgaccctcaacataagtataattttacatcttgactaagcataaatatgtttatatttatgtgtatatttaccaactaaaacaagtatttcctatagtagtactcttattgcttttaatacactaagcatgtcttattctgttttttgtttttttgtcagtcacaagttacatacttggtttcatggtgcactaatgcattgcaacaatttgaaaacccttgttaacagtggggataaagcaatgaagaaaacaaaatgcgtgtttttttcatgaccgttacattctactgggtctaaagagacaaaggaaagtatatagtaaatcaaataataagtactgtggggaaaagtcaagcagggtaattgaactggaaagagtcgaaggtgtatggcaggccgggcgtggtggttcagcctgtaatcccagcactctgggaggccgaggtgggcagattacttgaggtcgggagttcgagaccagcctggccaacatggcaaaaccccatctctactaaaaatacaaaaattggctgagtgtagtggcatgcgccagtaatccccgctacccgggaggctgaggag[134 bp omitted]tacatcgtgtgttatggaaggcatcacagataaagtaacatgtaacatgtgagcagagacctgaagggagcgagagaacaagcaaggctccctgctttctgggaggaagtttccaagctgaacatacctctccctctcttcgtcttctgtgttggctttgagagtttgcactatgctctatttcctctccgaagttctctcctagttatacaagattagctttcccttttccacttgtccagagacctggatttctaccaggttttagaacaatcatattattccaactgccttcccaaatctgttggagaataatttctatcaggatctaaaatagtatttcatgcctacagtctgaacttttcttaacctaactagttattagaatcccgcttgtcataagcctactgaggaagaggtgagtaggctgttcattgatgttattgtaggttggaatatggattttctttttgttgccctgcagctacctgattttagcttttagctctcatattaaactgttagacttacggttctacatggatcatgtttatacttagtgaatgggagcctgttgaccccactcttcgtttacacctgtatgaaaaacatgtcaaaagaatacacgatgctgtaaggacaaggtcacctttcgcctggtttatcaaggctttctcccatggcctaagtgtgaaattctgatatttctgaagaaagcatttactgccctcatctctaaatattgccttttttcttttttaataggcagcaagcatcaaaataagatggaaacactccaaaaatttgcattaaaatacctttcaaatcaagagctgtcctgctggcaaatctggaaacaggttgcaagtgaattaaccaggtgtcttcaggggaagagttcccagttattacaaggtgactctattcaggtttctgaaaatgagaacaatataatgaaccctaaaggagatagctctatttatattgaaaatcaagagtttccattttggagaacccagcattcttgcgggaatacatatctgagtgagtcacagattcagagtagaggtaagcaaattgatgtgaaaaataacctgcaaatacatgaagacttcatgaagaaatcaccatttcatgagcatattaaaactgacacagaaccaaaaccctgcaaaggtaatgaatatggcaaaatcattagtgatggctccaatcagaaattacccttaggagagaaaccccatccatgtggtgagtgtggaaggggcttcagttatagcccaaggcttccccttcatccgaatgttcatacaggagaaaaatgcttcagtcaaagctcacatctgcgaactcatcagagaattcacccaggagagaaactcaatagatgtcatgaatctggtgattgcttcaataagagctcttttcattcttatcaatctaatcatacaggagagaagtcttatagatgcgacagttgcggcaagggattcagtagcagcacgggtcttatcattcattacagaactcatactggagagaaaccctataaatgcgaggaatgtggtaaatgctttagtcaaagttcaaattttcagtgccatcagagagtccacactgaagaaaaaccatacaaatgcgaagagtgtggtaagggcttcggttggagtgttaatctccgtgttcaccagagggtccacaggggtgagaagccctataaatgtgaggaatgtggtaagggcttcactcaggctgcacattttcacatccatcagagagtccacactggagagaaaccctacaagtgtgatgtgtgtggtaagggcttcagccacaattcaccattaatatgccatcggagagtccacacaggagagaagccatacaagtgtgaggcgtgtgggaaaggctttacccgtaatacagatctgcatattcatttcagagttcacacgggagagaaaccctataaatgtaaggagtgtggtaagggcttcagtcaggcttcaaatcttcaagtccatcagaatgtccacactggggagaaacgattcaagtgtgaaacgtgtgggaagggcttcagtcagtcctcaaagcttcaaacccatcagcgagtccacactggagagaaaccatatagatgtgatgtgtgtggtaaggacttcagttatagttcaaatcttaaactacaccaagtaattcacactggagaaaaaccatataaatgtgaggaatgtgggaagggcttcagttggagatcaaatcttcatgcacatcaaagagttcactcaggagaaaaaccctataaatgtgagcagtgtgataagagcttcagtcaggccatagattttcgggtacatcagagagtccatactggagagaagccatacaaatgtggtgtctgtggtaagggcttcagtcagtcctctggtcttcaatcccatcagagagtccacacgggggaaaagccatacaaatgtgatgtgtgtggaaagggctttagatacagttcgcagtttatataccatcagagaggccacactggagaaaaaccttacaaatgtgaagagtgtgggaaaggctttggtaggagcttgaatcttcgccatcatcagagggtccacacgggagagaaaccccatatatgtgaggagtgtggtaaggccttcagtctcccctcaaatcttcgagtccacctgggtgttcacaccagggaaaaactctttaaatgtgaagagtgtggtaaaggcttcagtcagagtgcacgtcttgaagcccatcagagagtccacactggagaaaaaccatacaaatgtgacatatgtgataaggacttccgtcaccgttcacgtcttacatatcatcagaaagtccatactggtaaaaagctttagaaatgagaaatgtgttaccaacttttgtctgaatgcacatcttcaagtttttggctagtccatgctggtggtaaaccctgtaaaactactgagagtggaagggggtttgttcacacttggaatctttctaacaaatccatcaagatgataacacagaaccatgaacaggaatagaactcgtatttaggggagaaatagggctggtggctctcttggtaagatctagttaatataaatgatcacctttcattgtgaatatatgcctgaagataatgtgtggaaggatatttgccatatgctaactggttttttggccagggagagttttgggttattatcccttttctttaattttcattttatacttacagtgatcattattttcataaaagctgtaaagctatgaaaaatgaataaaattactaaaaattttctgtagctaaggactcatgattcttttatatggtatataggtgtaaaattaaggaatatatccccagagatgaatctttgatcttcagaagtaa[139 bp omitted]ggtgaaaccccatctctactaaaaatacaaaaaattggccaggcatggtggcacgtgcctgtagtcctagctactcgggaggcggaggcaggagaatcgcttgaacccaggaggtggagttcgcagtgagccaagattgcgccactgcactccagcctggtgacagagcgagactccatctcaaataaataaagaagaaagagagagagagagcaagagaaagagaaaagaggatagtcggtgcatcattgttttagtagcaaacatagaaatacttggattgccaaagtattttgtgctttaccaatccagtggcacactatgcagacatcaaatgggaaaaggtaaatttttagctgtggatattggaagatgttcagaatatattaacttgaaaaacaaaatgtgagatttttatgtgatcctattttgtaaaaacgcatagatgaatgggtattatagttctctctaaataatgggattttactttatgtatatttttatatttctttaaacttattttgaaataatttgaaactttcagaaaaattacagaaattatataaaagctcccatatactctttacccagattcaccagttgttaagatgtttgaattattctctcaataagtatgagcgtgtatatactgatacttatacatactaaacgcatttatatataaagttttgccatatgaatatgttacagacatccttctccctacactaaatacttaagtgtgctttcctaagaacaaggatatctacttagttacagtacaacattccagtgatttatttatttagagacagggtctcattctgttgcccaggctgagtgcagggtggtgattatagctcaccgcagccttgaactcctgggctcaagcaatcctccccactcagcctttcaagtagctgggactgcaggcgtggaccaccatgcccacctaatttttaagatttttgtagagatgggctctcgctatgttgtctaagctggtatcgaactcttgggcttaagtgatcgttccacctcagccttccaaaatgcaaggtttacaggcatgagccactgcacccagaaagaaaatttattattgatacataacactatgtaacctacagaccttatttaaatcttaaaattatcccaataatatatttattgtttttctgctctagagtccaaagattacacattgcatttagactcctttaatctgagttgctacctctgtttttaatgaccttgatatttttgagattattttgtagaatgtctcttaatttggatttgcctgaggtttccttacaattggatttaaattacacatttttttcccatgaggactctgtaagtggtgtgcagcacgtgaggaaacgaggtatgtttgtacctttataggtgatgttaacttggaacacttgattggggagggcggtgctgggtttttccactgcgaaattactatttttttctttgtaattaataattacaaaggcaactcctggggagacactttctgactctaaatagcttgtttttcagtaaattttcctccactagtttaagcattctgtaagtctggtctaaatcagtaattgctctgatggtgcgaaagtgtgatatattcaactttcatcattcctccaacacttgttagattgttgttctactctaaggaagtttcccttctgtcctgtttgcccatcatgtatttttaaataaattggagcacatctttactctgacacaatacagtgttccaagctcatcttgtacccttcctgcaccatccatggaatttgctgtttctttgagaactcagattcttctgattgggggatggtagttaaacatcaagatctgggtaatagctgtgcctttttttttttccctctaggaaggaggggaaagagttatacagataggaagagaagtagaaaggtagaaagaattaatgatgagttcctgcttttatctctagttcttaaattaatatcatagtgttttttttctagccttacccccattctatgttgcatcttcattcttcaagaatcagaaatttgtctcccagtatcattcatatatttactggggaatgtggacatgcatccaactagaacttgggggttctgtctttcagagagaacgggagtattggatgactgatgccagagatgatttttgaatggcatagtctcccaaacattataatttttcctattctcagggtattgaccctttaaaccaaataaaatgttcccgtagggccatgaagaaaagtatctgatagaaatatccaaagatagatatattcagatgagagccttccagtcaatgtttccttgcagatagtgttaaggaatggtttctggtgaagtgttgcggagctctcctagcctgtgagtgtcacggatgccattgattagcattgctttactttatttacctctcattctctgaaccttctcagaggtagtttgacaaagttctcaaagcacatccctctactgcttcttgagaggaccaaggcattttaggagaaactagtgttaacgagaccaagtcagaatattggtaataaagtagtagagtataatagaaagcagactgtcagccaggcacagtggctcacacctatagtctcaactactcaggaggctgaggtgggaggatcacttgagcccaggagtttgaagctgcagtgagctgtgattggaccactgcattccagcctgggtgacagtgagaccccatcttgaaaaagccaactgggtgcagtggctcccgcctttaatcccagcactttggctggccgaagtgggtggatcacctgaggttaggagttccagaccagtctagtcaacatggtgaagccctgtctctactaaaaatacaaaaagttagccaggcgtggtggttagcccctgtaatcctagctattcggctgaggcaggagaatcaattgaacccagcaggtggatgttgtagtgagctcagatcgtgccattgcactccagcctgggcaacgagtgaaactccatctcaaaaaaaaaaaaaaaaaaagaaaagaagaaaagaaaaagccaaccctggaaccctggaattagactttcttgctcagtgtaaccatttgctagttgcgtaactgcaggcaaaatgcttaacctctctattcctcaatttgcttgtgtcttcaatgtttgaggataatatcttttagttctgtggtaagggttaaaactatatgcctggcatatagtaagacctgtatagtgttaactattattttcaacatagatgtcactattactagatttctgctaatttatatttgaaatttctaaggaagggatcagtaaactatagcctgctggccaaatctagcctgtgtcctctctttgtacaacacgagagctgagattttaaatgtttaaagagttgtaagaaaaaaaaaatgctacagagaccatctgtggcccgcaagacttaaaacattactgtctggccctttttaggaagtttgccgttctctgatctaagcaaattttagtttctcagaagccttgcttctgagatacatacatactacagatatgtattatctcaattcagtacttctcaaatcttttaggtttaaaaaaaatgctcgaattgacataagaaaacacaagcatattttttacagaaaattgggaccatatatgaagcaatgtgctgtgtgtccaatgtgtagttaatctgcaattctatgaataaatgttattggtttttttttttttttttggtaagtaaacttaggttttacaggtttaagtaccttccctaagtcagtcagtagtgaatgtcacaaccacagtttgaactcaggtctatcttgctgacttcaaaactactcttaaatgctatgtgcataaattacattgcaaggccagaactcctaagtttacattctgtagagcatgcatcccatttcacacaagtaaagtgcaaatataagaatggaatatccttcaaaaagaacgaaatttgcctaggaagtcttttgctccatttcgactcaggcttttcctatactaagtcaataatctaggcaagcttgtccaacttgcagcccaggacagctttgaaagtggcccaacacaaattcataaactttctaaaacatgagattgtttttgcaaatttttaaagctcatcagctattttatgggtgacccaagacaattattcttctagtgtggcccagggaagctaaaagattggacacctcgatctaggagatatgttttgtatttcctatgtccttgattacatttctgacctcgttgatgccattaatttttaaatatttcttcttgtttgatgattaaaaatccaatactgaaaaattaactcaaatgttgaaaaagaacagccatgtttgaagctttaacctagcagttgtaacctaactgaatgtacctcttccaactgtaattttgcagtccacttgaggaaggaatcctttttaggacttacctgaaactatttacttggcagttcctccacaaaatcaggtttatttaaaaatatgcagctttttccaggcatggtggctcatgcctgtaatctcagcactttcagaggctgaggcaggagaatggcttgaaccccggagttcaagaccagcatgggcaacatagtgagaccccatctctacaaaaaaatcaaaaaattagccgggcattgtgtcacgtgcctatagtcccagctacaggctcagtggctgaagtgggaggattgctagagcccaggaggttgaggctgcagttgtgatgttgcactgctctccagcctggggccctgactcagaaataataatcttaaaaatgcaggttttaggatagccattcacttgaaaattctaagttggagagccttttgacaatgtatacccatatttctcttctctttttccctcccccttttaagttgtgaggtataattaacatacaataagctgtacatatttaaagtgttcgatttttaaagttttaatatgtgtatctttgaaaccatcaccacaatcaagatagcaaaaatatccatcattcttcaaagtcacctcatatctcccttttaatctccattctgctcctccccaatccccaagcaaccactgatctgctttctgacactgtatagtttgcattttctacaattctaacaaatggaaactgtacagtatatactttttttcctaacttcttgcagaaagagattcatccttgttgtttgtatagaattaattctttattactgagcattactgtaagtgtgtagatataccataattttttaaaaaaaatccatctgttgatggggatttgagttctcaaacttttggctattataaatgctatgacatgctatgaacacttgtttgtgtacaagtgtttgcatggagatatgtatagtctagaaatatatatatatataccatatataactcgactatatattttatcttggataaatagctaggaattgaataactggatcatatggtaaatatatgtataacttttattgtatttttaatttggtatttttatttatcagagttatagaaatttggaggagtacatgtggtatttcaatacatgtgtacaatgtgtaatgatcaaatcggtgtagttgggatgcccatcaccccaaacattgtgtttaacttttttttgtgtgttttgagacggagtcttgctctgttgcccaggctggagtgcagtggcatgatcttggctcactgcaacatcggcctgcggggttcaagcaattctcctgcctcagcctcctgagtagctgggactacaggcatgtggcaccatgccttgctaattttttatatttttagtagagatggggtttcaccg[136 bp omitted]tgggtgtgctgttttacgttttcaccagcagtgtgcatcttttcttcacattttcatcaaaatatgtaacggtcggtctcttttaattttagccattctaccctagtagtatctcactgtgtttttaatttgcatttttctaaacatgtttttcatgtgctgttttccattatcatatctttggtaaagtctacttaaatactttgcccatttttttattgggttacttgttttcttattgagttttgtgggttctttgtatattattgatacaagtgctttatcaggcatgtgatttccaaaattttttcactcagtctgtggttaagcagaagtttaaaatttttatgaagtctagtttatcataattttctttgatgtatcatgcttttggtgtcatatctaagaaacctttgcctaatccaaggtctcaaagactttctcctatgttttctgctaactttataagtttaggtgtttttttttttttttttttttgagacggagtctcgctctgtcgcccaggctgtagtgcagtggcacgatctcggctcacggcaagctccgcctcccgcgttcacgccattctcctgcctc[222 bp omitted]ataatacttatatataatacaaaacacgtttattcatcttaaaactatggatgtccagttatgccaacaccatttgttgaaaaaatgatcttttctccattgaattgactttgtgtctttgtcaaaaatcaattgaccgtatatgagtgggcctatttctgaactctccattctagctcgttgatctttttgtctcttcaccatacacagccagttgttcttgattactaacatagctttatagtaattctctctaaatcaggtagcacgagtcttccaactttgctttttcaaaattgttttagctattctagttcttttgctttttcatgtaagttgtagaatcatcttgttgattcttttaaagaatatttgcagggcttttaatgggaagtgtgttggaagatttgacttctttagtcttccaatcagtgaaaatggcatgtctcttcacttatttaggtcttttatttcatcagtgatttgtatttttcagtacacagatattgcctgttttcttagacttgtacttaaaaaattcctgaaaattttgttctgttgtaagtttctatttgttcataatagtatatagaaatgcaacttatttatattaacattgtatattaacattgcatcccaggaccttttgaaactgatttattagttctggtaactttttcattctttatacataatcatgttgtatgcaaatggagacagttatttcttgttttccaatatgttttctgtttctttgcttgtttccctaagagctttttctgcatctactaagatgattgaagagtttttgttctttagtctattaatatagtgacttaacattcattttaaaatgttcgaacaacattgcattcctgagataaacctacttaatcatgatgtagtattattttcatatattcgacttgctggtatttgttgaagaattttgtgtctatgtttatgaggaatattgatctgttgtcttcatgcatttttctaattttggtaacaagataatgctagccttataaaatgagttgggaagtgtttttctcctctttattttcttctttttcctcaaaatgtttgtgtagaattggtagtttcttttcccttaaatgtttggtacatataagaggcttaggcctggtggtggtgtttctggaggtgttttaacttgaattcaatctcattaataggtataggaatattcaggatgtctgtttattcttgaataaattttggtagtttttcttttttaaatacattgtctatttcatctaggttgtcacatatggcataaagttgttcataatatttccttattatcattttaatgtcattaggatctggcgtgtgtgtgtgtgtgtgtgtgtgtgtgtgtgtgtgtgtctcccaggctggagtgcagtggcacaatcttgcattcacagcaccctttgcctccggggcaggtttaagtgattctcctgcctcagcctcctgggtagctggtatttttagtagagagggggttttgccatgttggccaggctggtctcaaactcctgacccctgaagtgatccacctgcctcagcctcccaaagtgcagggattacaggcgtgagccactgcacctggcctgtcattaggatctgtaatcatatccttctttcagtcctacaattggtaatttctgttttgttttcttgttcttttcaaagtttattgctttttcttcactattgttatccttttcgtttggttgatttctgctttcatttttgttgttttcttctttcttgcttaggggtttttcttttttcatagacagggtctcactctgttacccaggctagtctcaaactcctgggctcaagcagttctcctgccttggcctcccccaaatcctgggattacaggtgtgaaccattgcacccagcttttttttttaaagtttattaagcttaaaaaagcttagataattgatgtaagttccttttcttccaatataagcatttcatgctctaaatttttctctaaatgctgccttagtggcattctacaagttctgatatgttatctttttatttttatttcttattttcccttttctcttctaactcatggggttttttttgacccatgggttatttaatttctaagggtagtgggggattttcctgagattgttttgttattgattctcatttaattttgttgtgatatgagaatatactttgtgtggtttcaattcttttaaattggtgcagtgaattacatggcccagagtatgatccatcttggtgtatgttttaatgatgttgattaataatgttgttgaggtcttctatatccttactggttttcttttcttttttccatcacggcaagagttcatcatgacttactggttttctatttgttttattgattaatgagaatgaagtctccagctgttaattgtgggttgtttagtctttgtctttatcagttttggctttgtatattttgaagctctgttgttttgtgcatacacatttaattttatgtctttttggtgaaattacctctttattattatttaatgtccctcttatttctggtaataatccttgttttgatgcctactttgtttgcttttaatatcaccactatagcctttttttttttttttttttttttttttttttttttttttgagagggagtcttgctctgtcgcccaggctggagtgcaatggcacgatctcggttcactgcaagctctgcctcccaggttcatgccattctcctgcctcagcctcccaagtagctgggactacaggcgcccgccaccatgcccagctaatttttttctatttttagtagagatggggtttcaccatgttagctaggatggtctcaatctcttaacctcgtgatccgcctgccttggcctcccaaagtgctgggattacaggcttgagccaccgcgcccggcccactgtagccttttattagtgtttgcctaatagtagtatagccactccagctttaatttgattattgttgctttattctccaatctgatgatttgttataattggtatgtttatgtcatttatatatcatttagtaattgatatggtcagatataaatctatttttggttaccttctttgtttcttttccttttgttacacattttttgctaatttttaaatatgatttcatatcgtatccacaattagcttatttttacaggctgaatatcccttacccaaaatgtttgggattaggagtgttcagatttcggattttttcagattgtggaatatttgtattgtagttatcagttgagtatttgcagtctgaacatctgaaatccaaaacactcccatcagcatttcctttgagttgtcatgtaagcactcaaaaaaattcagattttacagcatttggatgttcaggttggggtactcaacctgtacctcttttcattattgttttagcgtttactgtagaatttacaatattcatctatagttaatgacagcctctctttaaataatatatactattttatttattttatttcactaggtttttgggaaacaggtggtgtttggttaatgagattttgaatatatactctttacttatacaactgtacactcccaattccttccttcaaacttttgtccaattgtcaagcatttgtcgttggcatatgctataaagccacagtacattgctattatttttgctttaggagtcaagtgtctttcagagcaattaaaagttaaattcttaactgcttctggaaatcgtcattactttgcaagtttaccaaattttatatagcatcctttctgtttgaagaactttctttaatgtttcttgtactgctggttggctgctactgaattttttcagtttttgtcttaaaaagttttcattatatcttcattttcgagggatgtatttgctgggtatggaattatgtgttgttgtttttttctttctatactctttgtattctggtttgcatagtttctaatgagacatgtcctgtaattctcatctttgattctttgtatgtattgtgtctcctcacccatcccctgcctttggccgccttcaaaattttctctttattttgaatttactgcagtttcaatatgatgtgtctaggtgtgattgtttttatttttattttaaaaatacagatactaccattgaaaatccacagaaatatattcattcacctagaaactcttgtttcttactacattcttcatgtaataaaccaaaggatggaagggtgtatattttagtacattagaaaaagctcatttgcatatacttcttgaatttttcatgtgcacaaagacccactgaaagtatacacgaaaaactaacactggtcgggcgtgatgacttatgcttgtaatcccaacactttgagaggacgaggcagacagatcacttgaggtcaggagttcgagaccagcctgggcaacatggtgaaactccatctctactaaaaatacaaaaatcagccaggcgtggcggtacacatatgtaatcccagctacttgggaggctgaggcaggagaatcgcttgaacccaagaggcagaggttgcaatgagccaggattgtgccattgcactccagcgtgggtgacagagcaagactccatctcaaaaaaaaacaaaccaacaaaaaaaaaacacaaagattacatgtggtacatgggcttttggtataggcaaacaaccttgggtcagaatgggatgagttttcaaggtatattgtttatattattttaattttgtaccatgtaaatatattacctagtatagaaaaaaatttaaagcaaatttccccaaatgcattaatgggccttattttttcctttgcctagtttaattatttgattagagtctcagtattctctcatttataatacatatagacagttacacatccatatcttcatatttacacaattttagaaagtattacatttccctacagcctcactccatgggaagagtattgttaactggccattgtgttttaactcaccactggaaaagaaaaattaaacacacgtttaacaacgcagttttaaaacctaacaaagacccagtccacagaccccatatatgttactggctgctgctcaggatggtattttcatccctgagagattggaatgcttttttattttttgttgtcaatgggttttctcttgcctcattccaatcttactatttttctgcaaagcttgtttccctagtcctgctttcatccagaataaaagttcttaaaagcctatttctatcattaactaactccaggcttcacaatgagaacagtgaaaatatagtttctttttcctgaatcccataattagaactaccttgcagttcatattgtggacttctgttcattttcttctctccagctccagcattagctcatttatccaatcctatgttatccccagttgtctccacctcccctccaccccctagagttacagagacctcatattaccaggtgtttgaactacaggagttattgctacattttgctccccattccagtccaattgtacctgacaatattccaatttcaaatccattaagtataaactgttttaagaatggcaaagtataggctcaaaataaagagatggagaaatatttaccaagcaaatggaaagaaaaataaagcaggggtttcaatcctagtctctgataaaacagactttaacaatgataaaaaaaatacaaagaagggcattacataatggtaaagagatcaatgcaacaagaagagctaactatcctaaatatatatgcacccaatacaggagcacctagattcataaggtaagttcttagagacctacaaggagacttaagactcccacacaataacagtgggatactttatcacccaactgccaatattagacagatcaacaagacagaaaattaacaaggatattcaggacttaaactcagctctggaccaagtggacctaatagacatctacagaactctccatcccaaatcaacagaatatacattcttctcagtgacacatagcatgtattctagaattgaccacataattggaagtaaaacactcctcagcaaatgcaaaagaacagaaatcataacagtctctcaggccacagtgcaatcaaattagaactcaggattaagaaactcactgaaaactgcacaactacatggaaaccgaacaacctgctcctgaatgactactgggtaaataatgaaatttgggcagaaataaataagttattttaaatcattgagaacaaagacacaacgtaccagaatctgtgggtcacagcgaaagcagtgtttagagggaaatttatagcactaaatgccaacaggagatagcaggaaagatctaaaatcgacactctaacatcacaattaaaagaagtagagaagcaagagcaaacaaattcaaaagctagcagaagacaagaaataactaacatcagagcacacctgaaggagatagagacacaaaaaacccttcaaaaaaatcagtgaatgcaggagctggctttttggaaagactaacaaaacagagagaccactagtcagactaataaagaagagaaaagagaagaatcaaatagacacaataaaaaatgataaaggggatatcaccactgatcccacagaaatacagactaccatcagagagtactataaacacctctatgcaaataaactagaaaatttagaagaaatggatacattcctggacacatacaccatcccaagactaaaccaggaataagttgtatccctgaatagaccaataagaaattctgaaattgaggcagtaattaatagcctaccaaccaaaaaaaaagcccaggaccagatggattcacagccaaattctaccaaaggtacaaagaggagctggtaccattccttctgaaactattccaaacaatagaaaaagagggactcctccataactcatttcatgatgctagcatcatcctgataagaaaacctggcagagacaaaacaaaaaaagaaaatttcaggccaatatctttgatgaacatcaatgtgaaaaatcctcaataaaatactggcaaaccgaatccagcagcacatcaaaaaacttaaccaccatgatcaagttggcttcatccctgggatgtaaggctggttcaacatatgcaaatcaataaacataatccattacataaacagaaccgatgacaaaaaccacatgattacctcaataaatgcagaaaaaggccttcaataaaattcaataccccttcttgctaaaaactctcaataagctaggtactgatggaatgtatctcaaaataataagagctatttatgaccaacccatagccaatatcatactgaatgggcaaaagctggaagcattccctttgaacactggcataagacaaggaagacctctcttaccactcctattcaacatagtattagaagttctagccagggcaatcaggcaagagaaagaaataaagtgtattcaaataggaagagaggaagtcaaattgtttctgtttgcagatgacatgactgtgtatttagaaaagcccatcatctcagcctgaaatctccttaagctgataagcaacttcagcaaagtctcaggatacaaaatcagtgtgcaaaaatcacaagcattcctatagaccaataatagacaaacagccaaatcatgagtgaactcccattcacaattactacaaagagaataaagtacctaggaataaaacttacaagggatgtgaaggacctcttcaaggagaactacaaaccactgctcaaggaaataagagaggacacaaacaaatggaaaaacattccatgcccatggataggaagaatcgatatcgtgaaaatggccaccatacctcccaaagtaatgtatagattcaaggctattcccatcaaactgccattgactttcttcacagaattagaaaaaactactttaaatttcatatggaaccaaaaaagagccctatagtcaagacaatcctaagcaaaaagaacaaagctggaggcatcacgctacccgacttcaaactatactacaaggctacagtagccaaaacagcatggtactcataccaaaacagatatacagacaaattgaacagaagagaagcttcagaaataacaccacacatctaaaaccatctgatctttgacaaacctgacaaaaacaagcaatagggaagggattccctatttaataaatggtgttgggaaaactggctagccatatgcagaaaactgaaactggacctcttccttataccttatacaaaaattaactcaagatggattaaagacttaaacataagacctaaaaccatacaaaccttagaagaaaacctaggcaataccattcaggacataggcatgggcaaagacttcatgactaaaacacgaaaagcaatgacaacaaaagcaaaaactgatgaatgggatctaattaaagtgcttctgcacagcaaaagaaactatcatcagagtcaacaggcaacctacagaatgggagaaaaattttggaatctatccatctgacaaagggctaatatccagattctacaaggaacttaaacaaatttactaggaaaaaaaaaaaaactaaccccatcaaaaagtgggcaaaggatatgagcagacacttctcaaaggaagacatttatgcagccaacaaacatatgagaaaaagctcatcgtcactggtcattagagaaatgcaaatcaaaaccacaataagataccatctcatgccagttagaatggtgatcattaaaaagtcaggaaacaacagatactggagagaatgtggagaaataggaatgcttttacactgttggtgggagtgtaaattagttccaccattgtggaagaccgtgtggcaattcctcaaggatctagaaccagaaataccatttgacccagcaatcccattactgggtatatacccaaaggattataaatcatcctactgtaaagagacatgcatacgtatgtttattgcagcactattcacaatagagaagacttggaagcaacccaaatgcccatcaatgatagactgaataaagaacatatggcacatatacaccatggaatactatgcagccataaaaaggattaattcatgtcctttgcagggacatggatgaagctggaaaccatcattcttagcaaactaactctggaacagaaaaccaaacaccacatgttcacactcataagtgggagttgaagaatgagaacacatggacacggggaggggaacatcacacactggggccttttgagggttgaggtgctaggggagggatagcattagaagaaatacctaatgtagatgacgggttgatgggtgcagcacaccaccatggcatgtgtatacctacgtaacctgcacattctgcacatgtatcccagaacttacagtattaaaaaaaaaaaaaaagagtggcaaagtaatgtcagagaaatgatggagtaggtagcttcaacggcccatccttccacagaaacaaaacaacaaaaatgatttttaaaaaactgtcagaatcaatgtcatcagaactctgaaaagtagtccaaggtttacagcaacccagggaatgtagaatagagaaaacagcaacttaaaaatagtaggggagctttgtggtgctttcacttgcccttgatttacttttctctgcagctgggtgatggtcttgaaggtgacagcctatattaccagtgtaggacactgatctcttgctccagaggcagtggagcagaacttgttctcaattgtgtttgtctgttttgaactgtctgagggctacctgaaagactgttgcaagttacttggttttatcttatctaacttggaattctatcatggtggaaaagtggctaattgaagagtacattcctctaaatcattgaaaggcaaatgaacaacccactgtcacttgaggtaagagattactgttgaagcaaacaatatacagaatgacaacttgggaggaaaatctggggagagagattctgtgaggaagtagggtattgaaaagctccccacatacaccaggaaatttagaaaggcatgcacatactcagaggagaacatatgttcagaaatgacctgaaaaaactgcaagctttcacctctgactgatctttgacttagtgcaagcagtaagggaaggctttggcagagttgtaaatgacctggctaagcaccgaaagagggctccaacaaagagtcattgcgcaaagagtgggcaaatatttttccttttttgtttgtttttcatccagacattcaaggaaatccctgttaacacactgggtaaaaataaatgaaaagaatagaggccttagataccacacaatacagggaataccagttttacaaaaaaagtagtttagaaaactcactattcatttcccagagctgctcttaccacatggcacaaaattgggtggcttgaacaacaaaaattcattctctcccagttttctccaggttagacctccaaaatcaaagtgtcagaagggccatgctctctttcattaccacttagtagcttctgctggtatccattgatctttgatattccttggcttttagctgtatcacttcaagctctgtctctgtggtcacatggcattctccccatgtgtttcagtcttaatatggtatgttactcttctaataaggacactgtcgtatcgaatgagggtacaccctaatgccctcatcttgattgcatcttcaaaaaccctatttcaaagtaaggtcatgttcacaggttaggacttcaacatatctttttgggagacaaaattaaacctgtaacagtcactaaacaaaccattacgatccacaataagataagaacaaactgagcaggaggaagaatctgactttaagagataccacattataaaacaaacaaaaaaaaagtacacagcatgcaaataaaaaattatggtccattcccagaataaatgaacagaaactgtccccaaggaaacacagacactggacttaccagacaaagactttaaataaactgtcttaaatattctcaaagaactagaggaaaccatgaacaaaaataataaaccaggagaatcatgtctgaaaaaaagatatcaaataggtagaaattatttaaaaaccatgaattttggacctgaagagtataataactgaaatgaaaattcactagaggatttcaacagtatatttaagcaagcagaaaaatcagtgaactaaaggataagtaaattgaagttattccatctgaggagcagaagaaaaagtaagtagaactcagatacctgtgggatgccatcaagcatatcagcatatgcacaatgggagtcacaataagaggagagagaaaggagtataaggaatatttgaagaaataatgttcaaaaacttctcaaacttataagacatgaatctacacatagaagaagctcaaggaactaactccaagaagaataaatgcatagagatccacaccaagacacattataatcaaaccataaaaagacagagactcaaaatcaacaagagaaagtgacacctcatgttcaaagcctctataataagattaataacccatttctcatcagaaaccatgatctccagaagccagtatgatgacatatttaaagtaatgaaataaaaaaaacctgttagccaagaatcctatatctggcaaaaccatccttcaaaaatgaaggagaaattaagacattcctagataaacaaacactgagggagttcattgctagttggcctgccctacaagaaatacaaaatacttcaggcagaagtgaaaaaacactaaatcttgaagccatataaattaataaagaacactggtaaagtaattacataggtaaacacaaaagccaatattattgtattattggctcataactcctatatgatttaaagaaaaatgagtaaaatagttacaaatctatgttaatggggcacacaatgtataaagatgtaatttttcaaatcctaaagggaggaggacagagatacgggagcaggattttttatattttggaagctaggttagtattaattcaagctatattaacttctttaatgtattacaatatagtttgaattaatactattcaacacttttgcatctttaaattttttcataataaaatttggaaaaataggccagctgtggtagctcacatctgttatcccagcactttgggagggtgaggcaggaggattgcttgaggccaggagtttgagaacagcctgggcaacatagtgagaccctgtctctacaattttttttttaattagctgggtgtgatggcacatttttgtagtcctaactatgcaggagtctgaggctggaggaccacttgagcccaggaatttgaggctgcagtgagccaagatcacacccattgcactccagccggggtgacagagtaagaccttgtttcaaaaaagaaaaaaagacgttaactgtataccacagggtaatcactaagaaaatatacagaaaagggaataagaagaaaaattaaatggtacactacaggtcgggcatggtgactcacgcttgtaatcccagcattttgggaggccaaggtgggtggatcactttaggtcaggagttcaagaccaggctgcccaacatggtgaaactctgtctttactaaaaatacaaaaattcgctgggcattgtggtgcatgcctgtagtcccagctacttgggaggctgaggcatgagaatcacttgaacccaggaggcagaggttgcagtgagctgagatcacaccactgcactccagcctgggtgacagagtgagaccctgtctcaaaatggaaaaaaaaagaaaaaggtacgctgcaaaaacatcaaacagaaaagaaggcattaatcaagagacctaggaaagaaggcattaatcaagagacctaggaacaaaaaagataagccatgtagaaaacagatcacaaagtgaaagaagcaaggccgttttaaaatcaggaattaatttaaatgcaaatagattaagctctccagttaaaaggcaaaaatggacagaatggataaaacagcatgatccaactatatgctgtctataagagacttatttgcaatccaaagacaaaaaatgttgagtgaaaaaatggaagaaaattattccatgcaggatgtaaaaaaagagaactgaagtaattgtattaatattagacaaaatcgacttaggtaaaaaacttgacaagagacaaacaatgacattatatattgacaaaagagtcaatccatcaagaagatataacaatacagacattacacagctagtccccaaatatatggtgtgaaaattgatggaactgaagggagacataaatatttctacaatgttttcagacttcagtatctcactttcaataatggatacaacaaccagacaaaagatcaataaagaattagaggatttggaaacataaaccaaactcctagcagatatatacaaagcaccccacctaaaaccagcagaatacatatttttcttaagtggtcatgaaacattttctgggatagatcatacattaggccacaaaacaggtctcaataaaaataaaaaatctcacgtatcaacagaaagataaagtcacatgaaatgtattctcaggccacaaaaaaatgaaactcaaatcagtaatgaggaaaactggaaaattcacaaatgtgtggaaattaaacagcacactcataaaaaccgatggggatagaagttacagggaaattagaaaatactttgagatgaaaacaaaacatgattcaggattcctttggtgctaaaataataaaattctgctgactgagctaaaaaaatttgtgatagaaaatatcaaaggcagttccccactctatacacaatacccacccccataacttaaataaaacaactttctcctttctagagaaaatcacattggaaacaaagcctctgcaagaagtcctgatatatgtgcttttacaaggctgctaaatattacttcatttttgataccacattgacttgatctattgatgatcattctattgcatttatcatctcaagagcaagctgagtggatacaaaaaaaaatttaaattgaaataagggaagaagcattttcaagatataatttagatgttgtttttttccaaattacaatacagttggctcttgaacaacacaggtttaaactgcatgggtccacttatatgtgaattttttttcaacaaatatattgcaattttttttggaaatttgcaacaatttgaaaaagctcacagataagccgtgtagtctagaaatatcaaacaattaagaaaaatttaggtatatcatgaatgcataaaatatatgtagatattagtctattttatcatttactaccataaaatatacatgaatctattaaaaaaaggtaaaacttataaaaacttacacacacaaacacagactgtacgttcacagtcaagagaaatgtaaaacaaagatgcaatattaaatcaagcctgcataaagttaactgtagtacatgctgtgctactgtaataatttaatagctatctcctgtcactgttgtggtgagctcatgtgtgtaaatatctgcttaaaattccaagtaatgctaatcatctcaaagtgagcagttcatctctctagtaaattgcgtattacagtaaaaagtgatctaaaggtttcttattttttattgtgtttagtgcaatactataaaacttgaatactaccatgggacctatgtgaactgccactagtgatgttgcaagtgctcccaagatgcatagaaaagtcatgacattataagaaaaagttgaattgcttgatatgtactgtagaatgaggtctgaagctgcagctgcctgccatttcagaaagatggtttattttgtaaacagatggtgtaaacttacagtatcaataccgtacagaactgtaaatatttctcttcttcttgattttctttttttcttttttcttttttttttggagctggagtctcactgtcgcctaggctggagtgcagtggcacgatattggctcactgcaacctctgcctcctgggttcaagcaattctcctgcctc[221 bp omitted]ttccgctcgggcattctgggaagtgtagtgcagaagccgttgcaaccttgtgtacttccgctgcaggagggcgaagcagccgtcatctatcccctctgggaggtgagtcagcgcggaacctctgcatctacggcgagctttcctggcctgggcgttggactcgcaggtgcctgccctcgctctcagtgaagggaagtcgcagagggcggggacgacggtttgcttgccctttgtttttagggcggtgcatgggtctccaagttgggaatggctcctggtcgcacgtttggtttgaaggtctcccgggcgctcaagttccctcgccttccccaccttccacacgctctgctgtcttctggcaatataatcttggtagtttcttaatttctccgtttctcctctgtaaagtgagtttcatagtagtacctaactggtaggggtttcgtgagatttacttaagataaatagatgtaaaaatgcgtaggaccgatcctgacacacactgaaaaggtggctggttgttgccaatctgttatttcttcctggagaggagaggcattcagtctctgaaagcttctgtgagcccgcagtgggttctgagctccaggtgcagcgctactcgcccttctctgatctctgcacctcgcgaggctgttcctggattcctaacgtggggggacgggggtgtcaattttctctccatcttttttatttttccttcccttttaaggcatgagtgtgtctcacctccatgtggtgcctggggatgtccactgtcattcatcctggaccagaaacagagtttagatatcttccaacctcctttccttcctcagccttgactaaccggagggctgcagagaggagggtgttgaccccctggctcttggtaacattgtcccaacgtgagaggacttaatatatgctattgctatttctgcttagttggagaacagatttcccacactcattagcaatattatttttcctgctgggcaaatgctcaaatatttatggaataaatgagaggttggattaggcatgtgttcgtgaatgagtaataataaaatttgttaatacgttgagtgccagggtctcttctataggctttatatgcattaattagcttaatcttcagaacaaagataatattgtaattcctgttttacagatgacaacactgatgggtaaaacatttatcttcccaaagtaaaacaacaggaaagagcctgaactgggagtttgagctcaggctgagctcaggcagagtgggttcttgacctttgtgccactctccttcagccctgagaaatgtcagtcccatgggggtgcagtgactcacgcctgtaatcccacactttggaaggctgaggcgggaggatggcttgagcccaggagttcaacagcagcctgggcaacatagtgagactccatctctacaaaaaaattaaaaattagccacacacctgtggtcccagctacttgggaggctgaggcaggaggatcgcttgagcccaggaggcagaggttgcagtgagctgagatcatcccactgcactccagcctgggcaagagagtgagagtctgtctcaaaaaaattaaaaagaggaaaagaaatggtttcacagtttaggcaatgactgggggatgctcaagagtcataataaaaaaaatttttttaaggatttgcagggaagaactctgaggagatgacatttgagtaaatacctgacactgctattaaaataaataaatagatagggtttacattatccacagtctatggattgacccttttatgaatgatttcactttttttttttttttttttttgagactgagtctccctctgtctcccaggctggagtgcagtggcacgatctcagctcactgcaacctcccactcccaggttcaagtgattctcgtgcctcagcctcccgagtagctgggattacagatgcccgccaccatgcctggctaatttttgtatttttaggagagatgaggtttcatcatgttggccaggctggtctcgaactcgtgacctcaagtgatctgcctgccttgacctcctaaagtgctgggattacaggcgtgagccactgcgcctggcctaatgatttcacttttaaggatgaccttgatgttgcttgagcaaagcaaatgaaattaaaaacgcagaagaaattgacatataaagttcatcctctcctcctcccaattaatttaatagcctgagaattttgtagcttaaaggaatcttggagatcaattagtacaatccttgtctgactgtgtgtcattctttgattctgtgtgcatcaaatactcactatattctaggtgcttggggtaaaaagatgagtaatgttcattatctcacaggcaaaacagatgcttgatttactaattataccccaaatgccccagctacgctgaaggcttccaagaggagggattacaagagaaggacagggaagctggtcctctctggaggcagagtggcaggagcaaaggcacgagaggacttgacaacctaggaatgaacaaagtctggaaattcaggcctcgaaaagtggccctggtacatgtagtgagcagagctgagccaggcaccccaaaccccatttgtttttttctactaaatgtcgtgaaatgtcaagtcttgcaaaatcctgttactgagcagagcaggagggtgcaggtaaatataggaccagaacaaagggaattggatattaaaaattgatctctctccctagctttcagaagagaatacattgctctcgtccctactagagtgtttctgcctgaagtaggaggacccacgaacaggagtagctatctgtattgaatgctatcttgtatatactcactgaaacctcttaataaccctacgaggtagatactgttattgtcctcactttatgggtgaggaaataggcacaaagagctagtaagtcagaagagtcaattaggatattaggttcctcatcatctggctccagtatccctcagcagatcattttcagcagttcataccctccaacttccccttctctgatctctaagacatgattccttccatgtcttcatatttctgattagagaaggagacacgattaagagacaggctctggactcagctggattcagatgcagtctcacctcaccagctctgtgaccttgggcaacttaatctcagtaatcctcagcttcctcatccattaaatgggaacgacagtcatcatatcatcacttattgagagcttatataatgtgccacagacagaaccaaggcttttaccccatttaaaaaattgagtcataattcatataccatataattcacccttttaaagtgtgcaattcggtggtatttagtgtatccacaatgttaggttgtacaaccatcactattttctaattgaagaacatttgtatcacccccaaaagaaacctcatatgccctagccatcactctttactatctcttctctcagcccctggcaactattactttttgtctctatggtttagcctagccaagactattcgatttgctcattaatccccaaagcaactgtaaattagaatctgttattagtactacagtatttttcatttaagtgagacagatactgtcaaacttttgtttaaaaaaaagctagcagagacacattttaaattagtatttccttacgacagtgagcacgggaaagggagatacaccattgagactctcctggctacatgaagaaaattcataagtatttataccttttacaaaactgaatgctgatatcaattaaatattataggacaacaaagtagtaagtaatatagccaatcagaattatagacttttcagaggtaaaggtgaatttcataagataaagcattgtacagtctttgaaatctggatgttataaaagactctcttattggaaatgatggcaaaagacatttgcaacaacaattttatgatgcataatatcatctgcttttctgcagcttgcagggaaatcagttatacgagtttccatctgttcacacatttaacccttacaataatcttgcaagaaagcactatttttctcatttgcaggtgacaaatttgaggaatggggaggttaattagcttaaacagagttagtagccatgccaggatttgaccccagaccttgtgaccccagaatccacttttgtagccagtacattctgctgcaagtagctgggattacaggtgtgtgccaccacacccagctaattattgtatttttttgtagagatggggtt[133 bp omitted]gtgggctagggcctgtttctcatggcttctttctcttttcccagttctgccttcccaggaccctgcccttccccagaaggagcaggagaaaatgaccaagtttcaggtgagttgagttttgatttttatctcttaaaatgacatctcttttcctcaaagattagacacttttttttctcttccttgggaaagataaaggaggaaaacaggtatttggaatctgctagttacttgattttcgattggttcaattttttgtttatgtctttagcttttgttttggtagttttattttatcatctttatttcacaagtagtagtgcaaaaattcgtagatatcaaaaaatgggagaaaacctccacattactacattgcatacaaataatctatttcccccatactattttatatgtatttacatattgtatgtcttatatctatacttgtcagtgtattttaaagaactacaatcacattctatatacaattttcttttttcagttaatgttgttactagagttttatatgatttagtgttcctttatgtatttgtctcagaagggttttcattttttgtctaatttttcagaggctacaaaacaaacacacaatgctgtctctaaatagtatttcaatttgcaagactttttcatggggctttaaaaatgcaatatttacttacaaaaattatatatatcttaagtggtcaggtcaataacagttttatatcccacttcgacagttgtataattgcattagcccaccattcagaacaagatatagaacatttatattaccccaaaaaggtccctcctgtctctttcaagtcagttccttactccccagaggcatcctctgttatcccttacccccttctcaccctttccccctgaggccctaaagtccattgtgtcattcttagacctttggatcctcatagcttagctcctacttatgagagagaacatacgatgtttggttttccattcctgagttacttcacagagaataatagtctccaatatcatccagcttgctgcaaatgccattaattcgttcctttttatggctgagtagtattccatcatatatatatacacacacacacacacacacacacacacacacacacacacacaccacggtttcttttcttttgtttttttttgagacggagtcttgcactgttgcccaggctggagtgcaatggcgcgatcctggctcactgcaacctccgcctcccaggttcaagcaattctcctgcctcagcctcccgagtagctgggattataggcacctgccaacatacccagctaattttttgtgtttttagtagagacggtgttt[141 bp omitted]gggttggttccacatttttgcaattgcaaattgtgctactataaacgtgcatgtacaaacacctttttcagcgttgggactaaattgacccaacatttctaggacaatttggtagtatcagtcaagttataaaatacgtattccgtgtgattcaagatttacagtgctggggcatttactgttggaatacttacaaatgtcaccaaattaaatacacaggggttattttttagtagcacacacttttgatgtgactgtggaaaagtagtctatgagattggcatgtgggatggagaaaacgaggaagctacttaaagttcattcgaggccctcacaatccagaacgtcttcctgcctgttctttctacctgctcagtgctgcctctctcccagcagttattggccataagattgagattacatctgcttgatgttgtaggagatggtgacattcaaggatgtggctgtggtcttcaccagggaggagctggggttgctggaccttgcccagagaaagctgtaccaagatgtgatgctggagaacttcaggaacctgctgtcagtgggtgagcacaggcaccttctgtaactgaatatcagccctctggactgtcctgctttcaattatttaagactttgggacgcttaaaatgcttccctgaacttggggatgtgaattttctaattcctcagggacatcttgtctataccttgtctatttttctcaaattgcagttgtgaaatcttggtgggttttgaaatcagttggtgagttacattattattgtgtttaatgaaatgaagtagaaatattatagctccttgtcaggaactgcattcagtgcaacgaaaattgtaagtaaaaacaggaaagaagatgtgataaaagtagataatggttaggatcaaattatctgatcacttgatttcagtgatttacatttatgtatttgtgtaccggatcacaaattaaaaggtattcagacaatagctcatgatcacaattttgaaaaatactacttagagcgcatgaaaatggtggtgttggaattaaaatttttgactataatgcattcactttatatatatgccatttctttttcacaggctatcaacccttcaaactagatgtgatattacagttgggaaaagaagacaagcttcggatgatggagacagaaatccaaggagatgggtgttcaggtgagaaccatggagctctgagtctttgcggggtacagcctagtcctctcctcctcaccacctcctcagccaccagcctggcccaagaccccagaattcatcgccctggtttactgcagcagcttgcacatgaccttcctccttctacctccctccagtccattctccacatagccagatcatgtaagtcagatcatgtcgctccttggctcaaaagccttctgtgacttcccatctcactcattaattccaaaatctctacgagccttcagggtcctatgtgacctggtcacccactccctgtgaattgatttcctatcctttgcttttcactcagttctttccagccacacaagactgctgtgtgtttcttatacatgccaagggtgctttttttttttttttttctttaagacaggtctcactctgtgacctaggctgaagtggtggtgcaatcatggtacactgcagcctcgacctcccaggctcaatcgatcttctcacctcagcctcctgagtagctgggatgggactacaggcacttgccactatgctggactaattttaaaactatgtatatatacatgtttttttttttttggtagagatgaggtctcaccatattacccaggttggtctcaaactcctgagctcaagcaatcctcccacttcagcctcccaaagtgttaggattacaggcatgagccactgtgcccggcatacatgtatttctttctacctgaagccttttgctcttctgtctgcctgggatgttcttacctcatacatcctcttggctcccagcctacttcctttatgtctggtcagatgtcatctcatcacagaaacctgcttttttttttcttttagacggagtcttgctctgtcgccaggctggagtgctatggcgcgatcttggctcactgcaacctctgactccctggaaaactgctttgactaccctgtttaaaatacctatccttggctgggcgtgatggctcatccctgtaatctcagcactttgagaggccaaggtggcaggatcactcgaggccaggagtttaagaccagcctggacaacacagtgagaccgcacctctataaaaaaatttaaaaaattagctcacagctataactgtgccactgcactgtagcctgggcgacagagcaagaccctgtctcaaaaatacatacatacatacatacatacatacatacatacatttaattaaattaaatacccatctctttattctgcctttgtgattaatcatcaatcatcagctgacatattcatgtattacattttgtttacttttctatggtctctttccccattagagtacaacttcatgaacgtaagaattttacctgttttcttttcatttttctttttcttttcttagagatgggggtctggctttttcacctaggctggagtgcagtgatacaatcatagcttgctgcagctcaaactcctgggctgggactacaggagtgcactactgtgcccaacactaatattacctgttttaaaattgctgatccttattgcctttaataggcttggcacgtaatacctgttcatttaatatttgtcgaatgagtgactgaatgagtgaatgaatgggttaatggaccgatgtcagtaacgtcagttaatggactaatggataggtgttttcatttgaatagtactgtaatggctccctcacagatctcccaacctgtggtatctgcgagacttttggtgagagttgcctcatccatacacccagtgacaacctccctgttctgctttcacccctctccttctattctttctcttccttatttcattcccccttttcttcacttcttccttcatttatctttaatttgaatatacatcataaatacctaaaatacactaattaaagtcattcctacttgatagaagcaccaaaacgcaaaaactaaattaaacaaacaaaaaaagcaaaccaaaagcccaggagaatctctctgcttatctgagagagacaggccctggattttgtaagtagctggagtagtaaaatctttccaatcttcttatcttttattttcttgtatctccatgctccatgaacgttgactgcattgcaatcaggaatgttggatgctgacttctttgactgactgcctcatttttaaaaattttctttttttgtttttgactgcctcatttttgtgtataaacctaaaacttgggaattatgatcccagttattgccattgtcctttttttttttcttaacaggtagcttcttcccaacttcttctttgcctccttagcaaatcttgactgtttttgttttttttttctttttttgagatggagtctcgctctgttgccaggctagagtgcagtggcgcaatcttggctggctgcaacctctgcctctcaggttcaagcgattctcctgcctcagcctcccgagtagcagggactataggcgcatgccaccacacccagctaatttttgtatttttagtagagatggggtttcaccatgttggccaggatggtctctatctcttgaccttgtgatctgcccacgttggcctcccaaagtgctgggattacaggcatgagccactgctcccggccacaaatctttactttttttttaatttttggccaattttttattgaaatatatacagaaaactgtacaaattgtaaatgtatagctccctaaattttcaggaagtaaaatggcttgttttacagctcttttttattgaggtaaaatttacatgtgcacaccttaagtgtgcaatttgatgagttttgacaaaaggatataactatgtaactcacagcccttggaaaactgaacaaatctgacagcgtattctaccctcacctctctttattttttggcaaacatcagaattttttagggtttcacattctgcttatccacctacgtacccagctccacctatacaaaatattcctgaggtctattttcactggacagaagtacaaattaaagggcatcttctccctcaaggatcaatgaaacaaaatctcacagagtatggtgctaagtggatctcactgtcttcacttctcattgagagagttcacaggcagagaataaagaggtgtcactaaaggactatttcagaacatagttactcttctgatgttatgttcagcctacttataatttttatgacacctgtgttagttat[137 bp omitted]catggtgaaaccccatctatactaaaaaaaaaaaaaaaaaaaaaaaaattagccaggtgtggtggcaggcaactgtaatcccaactactggggaggctgaggcaggagaatcacttgaaccccggaggcagaggttgcaatgagctgatatcataccattgcactccagcctggggaacaagagcggaacttcgtctcaaaacaaaacaaaaaccttagcaccttaaaacaatgaacattggtttatagtttctatgggttaggtatatgggagcagcttagcttaaccctaagtgagggttctcactccggatctcaaaaagctgttaaagagtgacggagctgccgtccccggaaggctggactgggactgaaggacctgcttccaaggtgggctcgttcacatggctgtggcaggaggcctcgcttccttgctaagtgaaccattccctacggctgctgaagtgtcctcaaaacatggcagctagtttctcccagacccagtgattcaggagagtggaagatagaagccacagtgtttttatgacctagcatcagaagtgacagatcatcacttctgccatattctattggtttcacagaccaaacttgatacagtgtgggagggggcttcaaaagggaatggattccaatggggagtgatcactggggaccatcttgtattagccatttaggtttatcagaaaattcagtcaaaccaagtggcaacaattatcaatgcctttactcctatagggtgtgtcagctatgggaataagttttctaattctttttcatttatcatgttcactaattgaatattatatacttagaacctcattgaaaagaaggagaattctctcaaatctagctcatcaaatgtatgtttaaggactaaattaaggaaataatggtactatcttatgggttcattctcaagacagagaagatatttttctatattctcttcacttttgccaaggatgtcccctctttctttctttgagaattcttggcatcactaaataatccacttgtgaatgctgaaggagagattcaggcttttgtaaccatttttgggctttatcatatacagatgcaggttgtacaatgtaaccatgattctgaggctcacatatagccaggattttgtagattttatacatctgccacggaaaagaggagaggatttttttttttttttgagacggagtctcactctgtagcccaggcttgagtgcagtggcacgatctccgctcactgcaagctctgcctcctgggttcacaccattctcctgccttggcctcccgagtagccgggactacaggcgcctgccccc[141 bp omitted]agccaaagaggagggatttttaagtgattattcttatggacaaggaggtaaagtttctcctctacaacgtctttctagggcatctttttgttgctctgtagcctgtgtatttgaccacatacataagtcttggtattggccaggcatggtggctcacacctgtaatcccagcactttgggaggccaaggcaggcagatgacttgaggtcaggagttcaagaccagcctggccaacatggtgaaaccctgtctctactaaaaatacaaaaaaaattaatgaggtgtggtggcatgcacttgtagtcccagctcctccagaggctgaggcaggagaatcacttgaaccccagaggtggaggtttcagtaagccaagatcgtgccaccacactccagcctgggcaagagagtgagactccatctcaaaaaaaaaaaaaaaatcctctcctcttttccatggcagatgtataaaatctacaaaatcctggctatatgtgagcctcagaatcatggttacattgtacaacctgcagtctcaaaaaaaaaaaaaaaaaaaagtcttggtatagctctaaatgagtctcattaacattttgtatatagaagccagccttttttgt[174 bp omitted]ggtggcaggcgcctgtagtcccagctactcgggaggccgaggcaggagaatggaatgaacccgggaggtggagcttgcagtgagccaagagcacaccactgcactccagcctgggtgacagagcgagactccgtctcaaaaaacaaaaaaagagaaaaaaaaacaatgataaagtcaagctgaactctccactggtttattaaggtttcccaatgtggtcaacctgtgaaatgtttttttatttctgaacaaatgttcagttgtcttcattttcatttctgagttctctttatcattctaggacacaagaatcaaaatgagatagatacccttcaagaagtaagattaagattcctttcatatgaagaccttatatgctggcaaatatgggaacaatttacaagtaaattaaccagtaatcaagacctaataataaatcttcaaggcaagaggtccaagttgctaaaacaaggtgattccccctgtcaggtgtggacaggagaatctagtcaggtctctgaagatgagaactatgtaataaagctacaaggggagagttcaaatagcataaaaaatcaagagcttccattgaggaccacctgggatttctggaggaaaatgtatctgagagaaccacagaattatcagagtaggtgtcagcaaattgatgtaaaaaataagctctgtaaatgtgatcattgtgttaggcaaagaattgctcatcaacatgatgatcatggagtacacaaaagagagaaagcttttagccacaataattgtggaaaagactgtgtgaaggaatcatcccagcatagcataatccaatcaggagagcaaacctctgatgaaaatggaaaaggcttaagtgttggctctaatcttgaacttcaccagcaactacacttaagagacaagcctcatgtaaatgttgagtacgggaagggcataggttacagctcagggcttcccaggcatcagtgtttccacataggagagaaatgctataggaatggtgacagtggtgagggcttcagtcagggctcacatctgcaacctcatcagagagtcagcacaggagagaacctctacagatgtcaggtatatgcccggagctccaaccagaactcctgtcttccctctcatgagcttactcacccaggagagaagttgtgtacatgtggcaggtgtgggaagggcttccatcatagcttagattttgacattcactgtgtagacagtgctggagagagagcctgtaaatgtgatgtatatgataaaggcttcagtcagacatcacaacttcaagcccatcagagaggtcactctagagacaagacatacaaatgggaagtaagtgacaggatatttaataggaattctggtcttcaccagagagttcacactggagagaaaccatataaatgtgaggtatgtgataagggcttcagtaaggcctcaaatcttcaagcccatcagagaatccacactggagagaaaccctacaaatgtgatgtgtgtgataagaacttcagccgtaattcccaccttcaggcccatcagagagtccatacaggagagaaaccctacaaatgtgacacatgtgggaaggacttcagtcagatctctcatcttcaggcccatcagagagttcacaaaggagagaagccatacaaatgtgagacatgtgggaagggctttagtcagagttcgcatctccaagaccatcagcaagtccatactggagagaatccctacaaatgtgatgtgtgtgggaaaggcttcagttggagttcacatcttcaagcccatcagagagtccacacaggagagaaaccatacaaatgtgaagaatgtaggaaaggcttcatctggaactcatatcttcatgttcatcagaggatccacacgggagagaaaccctataaatgtggcatgtgtggtaagagcttcagtcagacttcacatcttcaagcccatcagagagtccatactggagagaaaccatacaaatgttttgtgtgtggtaagggctttagtaagagttcgttgtcttcagattcatcagagagtccatgatggtgatgaatctattaatcatgatgagtgtgataggggtgctcttcaagacttagacttcccattttcctcagaaaatccacacagcacagaatatttataaaatgtcatgttttaagaattcatgagctgagtttttatagttatctgaattccattgaagaaaacctatttttgtatgaatatgaccagtttcaagcagagcccaaaatgtcacagttgtcaagagaacacacaacagagaaaccctataaagaatgatacaatatgtttcaatcagaaccttcacatccaataagcaatatgcaggagtgaagccttcaaaatgataagtaaggtcagaatttagcaaaagtataatgagggacatgacaaaatctgtgtccactagaatctaagctccatgcaggaacattgtttactgctgcatgatcgtgaccttgaacaagtacctaagaaatagtggcttccctggaattgtttaacttgataggaaaaatctatcatatataggacatatatttgaatattttagtgagctcagccccaattcgtcattataattgtactgggaaaaggattcttgcaagaagccttaaaatgaattcaaggaaatgacatttaattaaaacacataaaaccaagcagtctacaatctgagtaatgtttttgcaattggcttctgtcctcagttcagcttcattttccaagcagtataataggccaaagtttctatctgattatttaagactttttccatacagtgtacagctgtgctatgtttctttggcgggggcttttgctatctttctttttgggagctagtgtgatagaaacagactgaatgaagaaaaaaatcccaactggtttttagttccataaagcttcatgagaaaggttttgcaaaaaaggggaatatcatatggcatgcattttagatgttaaactaagctgttaaggacacagcattttggacaacaccccatacttctcagacatcattacacgttatgcagtgtgtaatgatcaaatcatagtaattggatgaagggtttactcaggtgtatatttagtggaggtgggagaaagtttcccactgttgtttttttttttttgtcctggaccttaccttccaggacaatgaatacttaagttccatgatacctcatttcatgctaccatcagaaatacagggccaataaatgaaaaagaaaaaataaataaaaaagataaaaacaaaaaaagaaatacagggccaataatgctttgcttcatcaccaccagattactagggtgggctgctggagcacatggttgtttaaatcaagatgttttcaattgtgagaaatggaaaatcacactccaactagctggaacaaa[136 bp omitted]cagcctctactaaaaatacaaaaattagtcgggtgtggtagtggtgcctgtaatcccagctactcaagagtctgaagcaggagaatcgcttgaacccgggaggcggaggttgccatgagccaagatggcgccattgccctccagcccagggggccggtatgagactccatctcaaacaagacaaaacaaaaaacaaaaagaatacaggtaggacaggaccaggtctcgttgaaacagggctctgggtcaattcttctgtgattccctcacctctgcccttctggttgagttgattcccacatttgttcattccaacctactgaggaaatttacttaaagaatagatgctcagttaacattctcatatcacacactcccttttctgtgcacttctaaagcagttattttcggaacctctttttgctcttaatcatgtagagacttttcattttcctaaatatatcatacctaaacaaataactcatagaggtactgtgggttatggtttgccatttgaaccatgcatcaaccttctggagaatcttttaaagtatatacatttttccagagtaaaattaatttttttctaaaacacgtgaagtagtttttattaatatattaatagttgtatatatttatgggatgcacgtgatattttgatttgtgcacatacaatgtgtaatgatcaaatcatggtaattgggatatgcatcacctcaaacatttatcatttctttgtgttgggaacattctaaatcttctagttattttgaaatatacaacaaattcttgttaactgtagttgccctactgtgttattgattagctataataaataagttctagtgttactgacactgttctatctgatcatatttttgtacccattaaccaacctctcttcatccttccctcacccctatccatcccaacctctgataaccaccattctaaatcacttcctccttgagatcaatatttttagttcctatataggaatgagaatatgcaaaatgtgtctttctatgcctggatgattccacttaacacaatatcctctggttccatccatgttgctgcaaatgacaggagaaagaaaatgtggtatatacacacaatggaatattatccagccattaaaataataaaatcctgtcatttgcagcaagagattgtctgatttttgtttgttttttatttatttatttatttttttgagacaggtctcagttgaccaggctggagtgcagtggcacaatcctagttcactgtagtcccaacctgccagactcaagcaatcttcccacctcagcttcctgagtactagggactacaggcatgcaccaacatgcccagccaattttttgtaaagatggtctcaccatgttgcccagattagtctcaaactcctgagctcaagctattttcctgcctcgacatcccaaagtgctgggattacaggcatgagccactgcacctggcctgaataaagaattttatctatatatacttggtctaaacagaaaaagacctgcaaagaaatcatgaacactaacaaagtttgttatgtgcattcatgttagttggcaactccaaaactacttgccaggtattggaggactgaacagatgcataaacatactgatgatgctgggggccaatttctgactcttggagaaagaagtaaatatggaatgggaaaatcccttaggaagaatcctgcaatacttatttaaaatgagaggggtcagtattttacacagacacagacacacacacacacacacacacacacacacgactattatcccaataatgattagtatgcacagcacccagatcttggtttctaagtatcattccccactaaaagcaatcagagctctacagaatctgtggctgaggcagggaatatacaagataaacctaatatcttactgtaccagaaaacaaaggttcatatggatgacagacaggtagagagacatgggggtaggggaaggaaaagctcttctaacaaacagtaggatgccaattactaaaaataaaaggaatgacggagtcagaaagtcatattttgcagtcatcacagtaataactgattcagacaagaatcatcaatgaacactaaaactagtgggtgaaagacgagatgataacatagtctcaaagatcttcccacaaattgcttattaatttcaaagccaaaatagcaattttttagtggaaaaacctaggagacaccagttcacacaagttatcaacgctaacgccaacaaaacacatcatgtgtttcctattgtgatgcactgacaagtatgcattagtcatgcaatactcaatctacaaacatttaacttgaatctaatcatgaggagtcaaactcaaatttagggttgttctacaaaatagcttgttgtcttcaaaatgctcatttcatgaaagacaaaaaatggctatggaactgatccaggttgaagactaaagaaacatgacaatgaaatgcaggcatgatacattttagattggaccctgaactagaaaatgctataaacattataggacaactgtggaatttaaataaactctgcagattaggaaacattactgtttctttttctttttttttttgagatggagtcttgctctgtcgcccaggctggagtgcagtggcatgatcttggctcactgcaagctccgcctcctgatttcacgccactctcctgcctcagcctcccaagtagctgggactacaggtaccaccacagtgcctggctaattttttgtatttttagtagaga[137 bp omitted]ttacagattattttactacccccttgattgtagataggcttttgactgtctcaacaaaccgaggcagaagtgatgttggaacttccgaggcgagattaaaaagggtcatagtatttgtgctggcttttatctggatactagctttgagccaccatgtaatgtccagtttctgtgaagtcaccatgctgaagaggtcacagagagatagaaagacatgtctgagaaaccaaagctgtgtcattctctcagttcaggcagtagatgtggaaatgaacaggtctaactgcaatcacattagagaccccaagaatatgtgggattcttttgtattattcttgcatcttttcttaatgtttagaattaattcaaaataaaagttttagaactttaaaaaacattacaaaaatgttaaaaattactacacgagcccccttaaagtaacaagatcatatgtgtacatatatacgcatatcacatacacatatatacacactcatacaaaatcctgtctctgcccactttcctaaacatattctcagtaactaccaacgtcaataattataaatgtacctcctctcatttcactctgtattccactgaatggataagtcatcaaatattttgtcaatccaactgataaatgcaaagtttgctattatcaacaatgcaactgtgaacatccatttacacacatctgtaactgcgtgtctcagtcttcaaatgcatcttaaaagttttctccctttccttcctgatatggtttggctgtgtccccacccagatgtcatcttgaattcccacatgttgtgggagggacctggtgggaggtaattgaatcaagggggcaggtcttttatgtgctgttctcatgatagtgaatacatctcacgagatctgatggttttagaaaggggagtttggccaggtgcgatggctcatggctgtaatcccagcactttgggaggctgtggcgggcggatcacgaggtcaggagttcaagacaagcctgactaacacggtgaaaccctgtctctactaaaaatacaaaaattagccgggagtggtggcacatgcctgtaatcccggctattcaggaggctgaggcaggagaattgcttgaacttgggaggggaaggttgcagtgagccgagatcgcaccactgcattccagcctgggtgacagagcgagactctgtctcaaaaaagaaaagaaaagaaaagaaaagaaaagaaaagaaaagaaaagaaaagaaaagaaaagtggggcggggggggagttgttctgcacaagctctctctttgcctgctgcaatccagagactctgtctcaaaaaagaaaagaaaaaaaagggggggtgggacttttcctgcacaagctctctctttgcctgtcatccatgtaagacgtgacttgctcctccttgccttccaccatgattgtgaggcctcccagccatgtcaaactgtaagcccattaaaccctttttcctgtataaattatgcaatctggggtatgtctttatcagcagcatgaaaagaaagagacacagagacaaagtatagagaaagaaaagtgggcccaggggaccggcactcagcatatggaggacccgcgccagccctggtctcttgagttccctcagtatttattgatcattatctctaccatctcagagagggggatgtggcaggacattagggtaattgtggggagagggtcagcaggaaaacatgtaaacaaaggtctctgtgtcataaacaaggttaagaaaaggtgctgtgctttgatgtgcacgtaaacaaacatctcggtgcattaaaaagcagtattgccgctagcatgtctcatctccagcgttaaggcggttttctcctatctcagtaaatagaacatacaatagagttttacaccgagacattctattgcccaggaacgagcaggagacagatgcttcttcttatcacaactgcaaagaggccttcctcttttactaatcctcctcagcacagaccctgtatgggtgtcgggtgttgggctgggggacggtcaggtctttcccttcccacaaggccgtatctcaggctatcacatggggagaaaccttggacaatacctagttttcctaggcagaggtccctgtggccttctgcagtgtattgtgtccctgggtacttgagattagagaatggtgatgacttttaacaagcatactgccttcaagcacttttttaacaaagaacattctgcatagccctaaatccattaaacattgagtcaacacagcacatgtctctgcgagcacggggttggggctagggttacagattaacagcatctcaaggcaaaagaatttttcttagtatagaacaaaatggagtctacttctttttacatagacacagtaacagtctgatctttcttttccccatagtaaaagctattggatctttgtttgtatatgtgtgcacatatttagatatgtttatgtgattatattgttacatgtatgtaacatgtattatgttatgtgttggtctagcatgataccaaatggccttgtaagtagataattataaattaggtacaaatgcttttcaagttcacacagatcttcagtaaataaaactggttttaaaatcattagtaagataaaaatgtcttcagaattgtcagcatacatttttgtctgggcaaataagttttatagttttatagttgccttggctaaatgttttaaggtgtcacagtttggcacaaaggttctgagactataaacccaactgaaaacagagtaatctttgtgtattttttttgaaaaataaaactaatttaaaatttttagtttaatgaaaacagctaaatcttctgagttattggcaaaatgcccagtgtttaaggttcttacttagatgtatacctgatattcagattttaaaaatggttaacagggaaataactttaaataatcaccagctttatgtagtatctcagttttcagtactaatctagataagctgttaaaaatgagaaaatatcgagtacatatgagataaatgcttatagactttttgtgtaatttaaaaccctaaaaactttaaattaaataatactcattcaccctttctactttcccatatattatggcacagaatggttgatgacagtgtaaatccacgtaataggtcaagacctctatgaattgaaaataaaatgctactaaaattctagagaaaccaagggccagaccaacagctagccaaaaagtagacagtaactcatgacgtgctgctaaccatccattcatctgtcagactggctggaatcagaccatagacgcatcacactcgggtgaaggcagctcctcctcaacctgatacctcagacaatcagactgcttggtcatgtaaatcaagagaggacctaaagctatttattaaagaaaaatcatacaaataagtaacacccttctgttaacatgaattgttaatgaattgtacagtcgtaactacattctttatctttgctaaaactaacctttttgctgaatgggcatagatggtgactttcctccaaaataaaaggctgttgggtctgcagggagctacccctttctttaatcacaggcttgccatggtgcatacaaactgctaacctgagcacttgagtatttttatacttggagtaaaaatacttacctgtttcccttctatgattagagtaccacttaccatgagttccctgcctctgagaaaacacagaaacgtattttccttctggttcataaacaggttaatgccacccccactacaggatatgccatagatgatggcatatgatggttgatggcagtgtaaatccaggtaatgggtcaagacttctatgcattgaaaaacacagtaacagtacaccccacactatctcccacgatatgggatgactacctcttcaacaatgtggccaaacccttggactgactaataacatgtgactaggatggcacaatcaaaatagcatccacctccataacagagcctcatccttccccctggggtttgctatgggtctgcggcactcatggttggccttactgttggggatcagccttaataccacctgtagggtacccgaagtccagtggtgacaaaggaatgagaagagacaggttaagtgttcataaaggtgggagccagggggccagagcaaatcagaggctgcaaaggcccggagctgaagtctctacactatttattgaatatgatcacttagatctgagaagcagatgttcagggcgaaacagtgaaagggaggcagtgcattatatgcgtgatctatagcagtggcggtttaagtgaatctcctttgtgctcagtgtatctttaacttatcggagagtagctggtgggagcaggcttaactaggagcttgcgtatctgtctacatttcaatgtcttaaaggagtgacttttttcctgaacacagcgtttacagataagagagcaggtctcactctgagcatgggaacatgatggcaattaggaggctttcctcctcagaggcctcttgtggctttccacaacttattgtccgatatttttatggccaatttatgcaggcactccacaagcccttttcccagcacttacaactggaatggtagatgcacctaggggcgcccttccctaccaggatgtatcctttcccatttagactctctccatgccaactgggaaagtgtaaaaggcgagacgatcccatcaaaaataggcatcaaggtggttgtacccagtagtcctttctttcccccaggcagtggccacagatgtaaaattacaaataaaagacctggttaaacaaacggctgctacctttaataatatccatcatgtcatcccctttctcgctgaaaaaccctcacaagattagacaagtcgccctgcacaaccacatggccttagatatcctgactgcagcacaaggcagcccttgtgcactgattaagactgaatgttctgtccgggagcagtggactacagtgcctgtaatcccagcactttgggaggctgaaaagggtggatcgcttgaggtcaggagttcgaaactggcctggccaacatagtgaaaccctctctactaaaaatacaaaacttagctgggcatggtggtatacacctgtaatcccagctactggggaggctaaggcatgagaattgaacttgagaggcagaggttgcagtgagccaagattgtgccactgcactccagcctgggtgacacagcaaggctgtctcaggaaaaaaaaaaaaaaaagactaagtattgtgaatatataccacattattctcacactatgacctaagctatgcatacactggacatccatatttctgatacagatataggatcctctcccaggaccctttaacagtgtggtccagctgacttccttataaaagactttcatatacagtatggttggtattcttctcattgtcctcatcagctgctatggattttactactgttatacactgaggacagactttctcaaaagttcctaggtcctcagtcctcacactgtaaggctccagcaagttcctgctatagatctgggaatgtggatatatttccaactccaagtgaatagattccattctggtacttcccaactatgccccctttcagcaggaagcagccagattaactgcgttgcccactttccataaaaataggatgaagtttgacagtggggaattcttacagagtactccagctttgaaatgcattttaaaacttttctccctttcctccccaatctcagaatgtggccttatatgttaaaactcttcatctctccctttcccacgaggtacttcatgcacagtgctcacttgtataattgtgcttgcttagaaattccaagcactaattttaaagcaaaacagacacagactaaataaatcagctgcacaatcctcccacttaagggcagttatgaacagttcatccaccactcctgggccaaagtcaagaagatgcaaaccagacctccaaatgggtgactgctcaagataaaccatcagaagaagacatgcaagacctgcacccgactgcaccgctcccacgtatttcccacaccaagttttccctcttaaactccttcactcagcccaaaaagttggaatggtcttttaaggtatgagcctggccatttcccaattactaacatttgattagtaaaactgctttccttttactacattttgcttttcatgttttcagcctttgagtagcaagcagctggacttaagccagttacacatccataacacaggattacatgccatataatgagataaaacaaacaagatttagctataagggattttcatttatgcataactttgtttcacttttactttggtaaaattgatgtcactgtaattttttgaaaagttaaaatatcatcccaaccttccatgccacagtaaacaattgttagcatattaatatccttctattatttctatgcatataatcacatcattaggtggacatacttctattaattggataatcccaggaagggtctaacctagttttctcatgaataatgtcttctctagtcattacagacctctgatcatcttaatggctgtatattataaggatatatcaagacttactcaaatattttactttttcctttttgaattcaggataaatatccttgtgtacaatctttctcgcttttgtcacaatctcctaagtgaaatttctagtgctaggactgccagggcaaagagtatttattgtccactaataccaagaggtcttaagcatagaatgctgtgtaagtggtaatccatctaaatcattacactgaatacaatttcaaggttgggcacagaggttcacatccataatctcaacacttcgggaagccaaggtgggaggaatgcttgaggccaggagtttgagaccaacctgggcaacactgcaaggctctattaaacaaaataaataaacaataagatacaatttcaataaagactcaacaggtttcttgccctgccacttccttttaaggggataaatgtgacaaattaacatgcctgaaatctgccaaagctccttctaaagcggcctacatggaggaaagactacacatagaaaagcaacttgacctgaacctgaatgaaaataatgaaaggaaaccaagtattaacaattcaagtttactaagaaactttttgtcatcagtaactacttttaacactttcagagttacagtacagcttagtgtccaaaaattctaatcatgtaaattgcagggtcacattagataaaaacagtattgttcagtctataaactgacactaaaaatcatactgtacacaactgatgatacactgtacaaagaactaaggctgaaggatgggagccattcatgtcttttttccaaatttgtgttagtatggatggcagtattatatacttttcagtacttactgaaactaacgttattaaggctacttgcaggattccttttgaatataaattaatataaatttagagtagaaaacagactagaattttcaagtatttgtcctaattataggtattttcttcactttcttcagtaattgctgggccctattatgagccaagcacaattctacatggtagagatagagtggtgaaaaacacctccttacatagaggttacattttagttgacatccattttttctgtcaatcatacttttgttaaaggaaggcctctctcctgtgcagactccgacaagacttttctgctgtgttacatcttgagaaccgggacacctggtactctgatataaacactgatcatatttacagaacaaagttttctcgcatctgtgaaatatgacgtttgtaaagaattcatgtcctaaccaagtctaaaacacagcatttgagagacttctttcctgtcaagattctttgaagcttctagttttaaaggaacttttcacaatcatcagcatggacttcccaacggagacaaagatgtgagctctaactgaaggctgaaccacacctctcatttctacagattccctccagtgtggactctctgatggtagatgagatgtgacctctgactgaagcccttacaacagacatcacatatgtaaggcctctctccagtgtggactctctggtgtgtgtgaaaatgtgaggcctgactgaagcccttcccacactgctgacacgtatagggtttctctcctgtgtggaccctctgatgggcactgagaccagcactccaactgaattctttcccacattcctcacatttaaatggtttctctccagtgtgaattatctgatggacttgaagatttgacctctggctgaaggccttaccacaagtgtcacatttatatggtttctctccggtgtggactctctgatgggcttgaaggtgtgaggcctgactgaatcgcttctgacatgcatcacacttgaatggtttttccccagtgtggacgctctgatgggcttgaagatttgaagcctgactgaaacccttaccacactcttcacatttgtagggtttctctccggtgtggactctctgatgattgtgaagattcaagctccaattgaagcgcttcccacacacttcacatttgtatggtttttctccagtgtggactctctgatgtgcttgaaagtatgaactctgactgaagcctttcccacacacgttgcatcgaaatggtttctctcctgtatggaccctctgatggctctggaaacttgaggctgaactaaaacccttaccacactcttcacatttatatggtttttctcctgtgtggactcgttgatgactatgaagattaaagctcaaactaaagcacttaccacactcatcacatttgtatggtttttcttcagtgtggactctctgatgggtatgaagatttgagctacaactaaagcgtttaccacaatccccacatttatatggtttctctccagtgtgaattctttcatgggcctgaagatgtgatctctgagtgaagcccttcccacacacctcacatttataaggtttctctccagtgtgaactctgcaatgaatgttaagatctgtgctacgactgaagcccttcccacaactgtcacatctatagggcttctctcctgtgtgaataggcaaatgagcataaagatgtgagctctgattaaagctcttaccacactcgtggcatgtatagggtttctcccctgtgtggactctctgatgagtttgcagatttgagctctgactgaaacctttaccacattcatgacaccaatagcgttttttcccagtacgaacactttgttgaacaggaatacctgagctataactggtgtccttctcatgtgtactacacgctggagacttctttcccaagtgtacctgtttatgaagttcaagactggagctatcattgaaggcttcttcacattcattaccctggtaggttttctgtcctgtgtgaatactacgctgggtaagaggtgatacctttagggtatctttaccacaatcactattgctatgaactttatctcttttgtgcactatattatcatcatggtggtgtgaaatacaactgaaaatgtcaacatatggagcaaatatacatagtttgtttttcatctgagtctgcttacaacttctctgataattctgtgtctcattcagatatattttactccaagaattcggaactttcccagttggaaattcttgattttcaatgatactggaatgatcccctatgtgattcactagacagttgtcatccacagaagcttgaatagattctcctgctcccacttgacagggggaatcatggtgcttggggaactgagagctctttccttcaatatttatcatggagtcttgacttctggctaatttgctcgcaatgtgtctcttgatttgccagcatgaaagctctcccagtgaaaagcaccttaatcctgctttgtgaagagttgccatctcattttgattcctgtctcctgaaaggatagagagaataaggaataaaggaccaagagactgacattagcaaagtagagaattaagatctaagctctcattttccccatggaaacgtcaaaaaaacaactagactggctgaaataaatttataggaactctgaaaagcagctgcaaccaagagaacaccaaatgttttaaaaagccatatttaagatagaaaatttgagatcagcccagggtatggttaaggtgtatcttgggtcttttctgagtatgagtcttgctgcctgtgtgtattctccagtatacacaactccaaagtgaatgctttgtccagatgtttccaaattttacacatagttccttcggtatcaggctttagttcatgatggaaactttcagcttatctttaccatcacagattttcctggattttatttgcctctcgaaacacagaactacagatctaagaataggacaagaggtagaaaccagccaactgcagaacaacaaaatgatatctcagtaagtacttagaaaggaaaaattgacttctttgcctataagaatggtaaattaaaagtcacctcttctttggctacagcaactgaatcgtaagtagcaactacataaatcaggcaaaatatatgcctcaattataggctctcattatacaacctgcacatctagaaacatgctcaaaataactgatagacaaatccatatttatagctggagatttcaatacccctttccaacagctagtaaaccaagtaggaagatatgtggtggcactcatgtaactgagtccgtgctgtgaaagggacagctgccctggccccttgggggtcagaagtcaccatgccaagggctgtgtgaaaggtgctaagttccactgagacccaagctccagtttttgagaagccaaaaggagggagcaccaggcttccttccaaccagtggtgctggtatcctccaagtttcttcctccaggccacctgtggatatgccatccagaaaccagtccagcccagccaagatgatgacctgtccccttatacgctgctcaaagactaccagaactttcccaggattgagagggttgatgacattgggaaaagacacttgtctttggaaatggccaaccaggagaagccaaaaattaagccagaatagttgataaaaaaggacatggcaagccctgaggacaccagctccacagaggctggaattatcgacttgaacatcaaggcccacagttttgttttgttttgttttgtttttttgaaatggagttttgctctgccactcaggctggagtatagtggcatgttctcggctcactgcaacccccgcctcctgggttcaagcgattctcccacctcctgggttcaagcgatcctcccacctcagcctcccaaaatgctgggattacaggcatgagccactgcacctggccaagatctgcagttatgaaaaacacatgctgacatattgaaaggacaaagcccacaaatgctatctgctgataagcatcaaccagaggaaaaagatgctcaaaaacctccacaaaacctattatgacaactctgggaagacatgcagggaactggggactgaagacacctttcccctctgaattaccaaacagcccactgaccgtcgcttctgactaagaaggctctgtgaattcaggttttccagaatgtgcaaaagctgaagaaacaaaaaaggtcttagctgcagcagcatcagcagtcagaaaacaaaacaaaacaaaaacaataaattatataaaaaataaagcaaaacacaacaaaaaacaagtaggtaataagtgaagatacaggcttgaagcaatattatcaaccaagttgactacttggtctttctaggacactctatccagtaagagcagaaaatgttattttcaggtgcacatggaacatactccaagacagaccatattctaggccataaaacaagttctaacagatgcaaaaggagtcaagtcatacaaagggtattctaaccacaactgatttaaatcagaaattatgaacagaaacatctctgcaaaatcttcaaatattcagagaataaataacatacttctaaataaactgtggatcaaaaataattcaaaacagactttataaattgagtgaaaataaaaaaccaatatatcaaaatttctacttagagcaaaatttataaagcagaaatgtgtcatagaaactaaaaacacaagaacaaattaaacacaaagtaagcataaatagaaaataagaaaacaaatagctagttctttggaaagaacaataaaattaataaactctagcactcatgataaaaacagaaagaagatacaaattacaaatatcaggatgagaggtgacatcactatagatcctgtatatattattaaaaggataagggacttatgaactttatggcaataaatgcaacaatgcagatgaactggacaaatttcttgaaagacacaaaataagtttacttgagaacatacagataatctgaatagcccttatctaccaaagaaacagaattcatacttacaaatatttccacaaacaaaagttcaggcttatagggcttcatccatgaattttaccaaacatataaggaagaaacaataccaatgctagacaaactcttccagaaaaatgaaaaggtgtaaatacttctcaacacattttaggaagccagcattattctaacaccaaaataagacaatgacattccaagaaaaggcaactacagactaacattcctaatgaacatatttataaaattcttaacaaaatgtgatcaaatcaaatctaacaatgtataaaaaggataaatcaagacaaagtagtgattatctcaagaatgcaaggctgatttagtattctaaaattagacctaaatgcttccctcagaaaatcaggaacaaggcaagtatatccactctcacaacctttattcaacattactgaagttctagtcagtgcagtaagacaggaaaaaaacaacataaaagaaataaagatcataaaggaaaaaatgagccagataaataatttgaaatactgattttaaggaagctcaatgagatacaaaagaaatttgaaaagcaatacaaaaaatcaattcaggatatgaatgagaaatttaccaaagagaaagagataggtatcttttttttaaaaagccaaacaaataaaaacttctggaaatgaaaaaatcattgaagaaattacaaaatacagttgaaagcttttacaatagactagacaagcagaagaaagcatctcggtacttcaagacaggtcttttgaattaatctagtcagacgaaagtaaagaaaaaagaataaggaagaaaaaacaaagcttctaagaagtatgaaactacataaagcaaccaaacctatgaatcataggtattcctgagggagaagaaaaagtaaaaagtttggaaacctagttaaggaaataattgaggaaaacttccttaatctagcaagagctttagatatccagataaaagagatctaatgaactccacgaaaatacattgcaagatggaactcaccacagcatacagtcatcagactaaggtttatatgaaggataaaatcctaaaatcagcaagagaaaagtgtttagtcacctataaaggaagctccatcacacaattcaacttgtagaaaccttacaagccagaagagattggattctattttcaagttgcttcaaaaaacaaaaaaatttgtatcctactagaataagctctataaatgaaggaaaaataagccttccccaaataaacaaatacttagggagtttgtcaccactagaccaggtctacagggaatgctcaagtgagttctaaccatgaaaacaaaaggttgatacttgccatgataaaagacacaaaagtataaaacttgcaggccttataaaataattacacaaagaaagaagataagtcaaatggcaacataactcatcttaccgataaagacacagactgaaggtaaagcggtagaaaaagatattccatgcaaatggaaaccagaaacgagcaggagtagctatttttatatcagataaaaaaagactttaaatcaacagcagtaaaaaaagacaaagtcattacataatgataaagtgatcaataaacaaataagataacaatcctaagtatatacacaccaaacatcagggcacccaaattcataaaacaaatattattagacctaaaaaaatacacagcaatacaataacagtgggggacctcaacaccccacagacaccactagatagactgagacagaaaatcaacaaagaaacactggacttaaattaaattttaggtcaaatggagctaacagacatttacagaacattctatccaacatcagaatatacactcttctgattagtgcatggagcattctccaagatagaacatatgttaggtcacaaaaaaagtctcaatacatttttaaaaaccaaaatcacaccaagtatcttctcacacctcagcagaataaaactagaaatcaattccaagaagaactctagaaactatacaaatacatgaaaattaaacatgatcctaaacaatctttgggttaatgacaagacaaattttaaaatttcttgaaatgaatgaaaacgaaaatacaatataccaaaacctctgggataaagcaaaagcagtgctaagagggaagtttatagtgttaaatgtctacactaaaaaaaaaaaaagataaaaaattaacaacctgtgtctcacctccaggaactagaaaaacaggaaaaatccaaacccaaagtcagcagaagaaagatataacaaagaccacagcagaactaaataaaatagagaaccatggaaccatacaaaggatcaatgaaacgaaaagctcgtttttatctctgaaaagataaaattgatagactgccagtaagactagccaagaaaagagaagatccaaataaacataatcagaaatgaatgagacattacaactaataccatagaaataaaaaacatgatcagacactcttatgaacaatacacttgaaaactagaaattctagagaaaatgaattcctggaaacatacaacctcccaagattgagcccatctggctcccaagattgagccaggaggaaacagaaatcctaaacagaccagtaatgagcagtgagattgaatcagcaatgcaaaacctcccaagaacaaaaaagcccaggaccagacaaaggtacactggaattccacaaaaggtacaaagaactggtaccaattctactaaaactctttcaaaaaatctaagaggagagaatcctccctaactcattctagaaagccactcttgctctgataccaaagtcagataaagacacaacaaaaaaagaaaactacagagcaatatccctgatgaatgtagatgcaaaaatcctccaaaaacaaacacaaatccccccacaaaaccccccaaaccaaatctaatagcacatcaaaaagataagccaccatgatcgagtgggttttattccaaggatgcgagaatggttcaacatacacaaaccaataaatgtgattcagcctataaacagaattaaaaacaaaaaccacatgatcatctcaacagatatataaaaaccatttgacaaaattcagcatcctctcatgataaaaacctttgacaaactaggcacagaagaaacatatttcaaaataataaaagccatatatgacaacccataggtaacatactgaatggggaaaagctgaaagcattccccctaagaactggaataaaacaaggattgcccactttcaccactcctatttcacgtaccactggaagtcctagccaaagtaatcaggcaagagaaagacagaaaaccaatctaaattggaaaagagtaagtcatttaatatctctgttttctgacaatctgatcttatacctacaaatccctaaagactcctccaaaagaatcctagatttgacaaatgacttcaataaagtttcaggattaaaaaaaatcaatatacaaaagtcagtagcatttctatacgacaataatgatcaggctaaaaaccaaatcaagaacacaatccaatttatagtatctacaaaaaaattaaaatacctaggaatgtatttaaccaaggaagggaaagatctaaccaaggaaaattatgaaacaataatgaaagaagttgtagatgacataaaaaaaatggaaaaacatcccatgttcatggatcggcagaatcaatattgttaaaaagaccatactgcccaaagcaatctacaaattcaatgcaatggctatctaaatactaatgtcattttttgcagaatgaggaaaaacaattctaaaattcatatggaaccaaaaaagagcctgaatagacaaagcaatcctaagcaaataacaaagctggaggcattacattacctgacttcaaattacactacatggctatagtaaccaaaacagcatcgtactgatataaaaatagatacacagatcaatggaatagaaaagagaacccagaaataagtcacatacctacagccaactgatctttgataaagtcgaaaaaaacatacactggggaaaggacatcctattgaataaatggtgctatttaatccatcttgagttcattacctgagatctccagagatccataacagattctaataatagccattctggctggtataagatgatatctcaccattgttttaatttgcatttctagaaatcactggtgatttcaaccacaggaggcaacctgaaaaagctccaagtggtcaaagtagaaataacttggtaacaaaataaacaatgcaatactggattataacacgaagtataaataaatacatatgagcccatactgattataaaatggatagtaagtgacaataaggagttactgttgtagatagacactgataaatctatgggtgatatgacattctccagcaaaaaataaaagggaaagataaaacaggaacagcagaaagttgataactgctaagacagtatggatatacagagtctatggcattatttacttttctatgttttttaagttttcaaaataaaaagtttaaagtcataggaaaacaaataggtcatccaaattatgtgtatgttgggggaagggtggagaagcagaaattatccatttaaactatcagtcaattttcattaacagaaaaagatgtaaaatgaatgttaaaactgaactgaatggtgggattacaaatggcatcctactaagtcatttttgtcacatatctccctcagtttggtggattagatgatatcttaacaaaggacataagcaattttagaattaatcaattttctatgttttatacatttttgaagtatatggacctaacaaatatatacacgtagactatgattatacagaacactccacccaataacagcagaatacacatttttctgaagtacatacagaacattttctaggatacaccatatgttaaactacaaaaaagccttaataaatataaaaatattaaaatcacacaaagtatctctgctgatcaaaatgaaatgaaactagcaatgaatagcagaataaaacctgaaaattccataaatatgtgaaaattcaacaatacacatacaaccaatagatcaaagaagaaatcacaggggaaactagaaaatatcttgggataaatgaaaacgaatccactgcaaaaacagtgctaagggggaaatctatagctataaatggttacaatgaaaaggaaaaaggtctcaaatcaacatcataaccttataccttaaggaaatgaaaaaagtaacaagccatcgccattaccaagaccaagatggctgcaagacttgctgccttcttcaggaatgcctgggccaagcagccagtgctggctgtgtccttcaccattgcaggccatgctataattctgcccccactcagcccctacaccaagtatgccatcatgatcaaccaggccacaccctacaattacccaatgcctgtctgagatgatgggagcatgccttatgtgtccagccacccccaggactcctagggcccaaccctggagtggctgaagaaactgtgagcatctccactgacagggaggaggaccctccccagtggctcccaataaaaatgtgaaaagcaaaaaacaaaaccaaattaaacccaatactgacagaagaaaggaatctaacctttttttttgagacagagtttcgcttttgttgtccaggctggagtgcaatggtgcgatttcggctcactgcaacctctgcctcctgggttcaagcgattctcctgcctcagcctcccgagtagctgggattacaggcatgtgccaccacgcccagctaattttgtatttttagtagagacagggtttctccatgttggtcaggctggtctcgaactcccgacctcaggtgatccgcccaccttgtcctcccaaagtgctgggattacaggcatgagccaccgcgcccagctggaagatggtattttaagaaagcctctcatgaaatgatttctgagcagaagcatgaatgaaataaggaagaggggctgggcgcagtggctcacatctataatcccagcattttggggaggctgaggtgggcagattgcttgagtccaggagttcaagagcagcctgggcaacatggggaaacctcgtctgtacaaaaaatataaaaattagctgggtgtggtggtgcacacctgtagttccagctactcagaaggctgaggtgggaggattgcttgagcacaggaggtggagactgcagtgagccgagactgtgtcattgtactccagcctgggcaacagagtgagaccctatctcaatcaatcaatcaatcagaaagacaaaggtttaagaaaaaacagcattccagccagagaatagaaagtaaaaggctgtgatgcagatgtcatatctgaggaacaagtgagggtggcagagacaaagggagggggaaaaacagaatggtaaagctaggtgaataggcaaacattatacagccttacaagctccttaaatacactggattttactcatgaaatgggaagccagtggaggatctgaagcagagagtgacatgatgtgacagatgttttcattctttttttttttttcctgagacagagtctcgctctatcacccaggttgcaatgcagtagcagatctcagctcactgcaacccacgcctcccaggttcaagcaatccccccatctcagcctcctgagtagctgggactacaggcacacctacatctagctaatttttttacattttgtagagacagggttttgctatgttaaagaccccaggctggtcttgaactcctgacctcaagtgatccacctgccaggcctcccaaagtgctgggattagaggcttgagccatcgcgcccaaccatgacagatgttttttaaaaaagtctctcaggtagctgagtggagaagaaattatcctgaataaaggaaaaataacagctgttaactacgattccggctgcacagtactcacctgaatgcttacctctttgggtttgaagctccttcatccaaagcttttcttccctctccaactgggatatcatatctggtttgaaggactgatgtcctataaaaagatagtatttaagtgaaaatgttaaaggcaaagagtactgaaaaaatctggttccaatcacatgatgtaagtctcctccctgccccagcatgcaatgtttagggaacatttttttttgtcatgacacattataagaaatacatttactatcactggaaatacattaccctgtgtaaactattgaaataaaaggttaaaggacctatttctaatcaatatctgttttcatcacatcccttacggcaagcagcagcagttattgccacaatgtgcaccattctggctaaggggctctgatattgttactctattttattacaaaaatgcttatgtaacttactaatttactgacccaccaatggatcatgacccacaagtttaaaaaagatatacgaaataaggaatcaggaggagccaagctcaactgttcttttatagttcatgtctaaaagaaaatcatctgtcttggaacaaaggtcagaaacatcttgtctctatgctctaaagagatagaaaaactctagtctctgagcagtcccaaagccttgaacaaggggacagaggccagggatgccactaaacatcccaaaatacacaggatagcctgatacaacacagaattatctggcccaaaacatcaatggcatggaggttgagaaaccctgctgaattacagagggtgcctgtccttacccactgaaaccaggttcctaaagttctccagcatcacatctcggtacagcttcctctgggcagagtccagcagccccagctcctcctcagtgaaggccacagccacatccttgaatgtcactgcctcctagaacatcaagcacatgtaacctcaatctcacacccaatggccactggcacctaagcaactctttctgtagagttactattcttccccttccacaatcacaccaaaaatgctagggggaagaaggaaaacaccttgtacatgtaacgtggtgccctttatatagttaaattcctagaactgtcattgttaaatcatggcatacacacattttaccatttgactgatagcaccaaatttgataagaaattttgcattaatttcttcccaacagtgtttgatagtactaccactattttgtcaatccaacaggccttcataaagctctggcacaagtacgcagttcactctctgggttctcaggaacatgctgtcttggtcaactgcagcagcatttagggtcaaggttaagagtacaggctctggagtttgactgccttagttcacattccaagggtctatccattgctagttttgtgacgctggtcacaaaacctcaatttccacatctgtataagaggacctatatcatagggtccttgaagggattaaatgagtgaatacatataagaacttaggacagtgtgtgacatacagtaagtactcaataaatgttgatcattaactcttattatcatcaccatcatctatttcatcccattcatagctgcatgatagtccataaacatgatctacaatatatttaaccattctaaataatgcacatttgatcattttaaatttaaaaatgacaatgccacaagaaaacatatttttacatagatcttagccagctcgtatggttatttccttaagataagttccagctgggggcaatggctcacttctgtaatcccagcactttgagaggtcgagacgggcagatcacttgaggtcaggagttcaagaccaacccgacaaacatggtgaaaccctgtctctactaaaaatacaaaaattagttgggcatgatggcacacatctgtaatcccagctactcggggggctgaggcaggagaatcacttgaacccggcaggcggaggttgcagtgagccaagatcatgtcactgcactccagcctgaatgacagagcgagactccgtctcaaaaaaaaaaaaaaaaaaaaggtaagttccaagaagtggtaattacattgtaaaaaaatatatatacctttgttttgctggtataatgttaattttctcaattaactcttcccgtaagagattataagtattcccgattctccatactctggccaaaactggacatttttttttttaaatcttgagtaatttggtgagtgatataaacagctatttaatttttttaaagatgatctgatattacttttcttcacatattgcctttccttaatcctactgggatttttcatgtatcagtaacattactattaagaatattaagtcattttctagaatatataaattcctaccccgcacctgtttcctacttgtctcataaagtttgtatatggtgtttttctgtatggaaattaacattttttatctgaagacactgcacatccctgcatttgttttggctggagttctgaacatctatgtaccaaacaactcgatgacacatgtggcaaagagccatgcactgagaaagggaatctggtgaagagcaatgtgatttctggagcccttcatccaccaggacatgccagggacacatacatgtgtagcatagcctcaagtccctgaatagtctcttttttttttttcttttttgagacagtctcactctgtcacccaggctggagtgtagtggtgtgatcttggctcactgcaacttctgcctcccaggttcaagcaattttcctgcctcatctacatgagtagctgggcttacaggtgtgcgccaccacgcccagctaatttttgtatttttagtagagacaggctttcaccatgttggccaggctgatctcgaactcctgacctcaagtgatccacctcagccccaaagtgctgggattacaggtgagccactgtgcctggccttcacccaaatggaacacctgaaacttctggcttaggcactggaagctttaacgtcagctgggcattgagtggacttcaataagtgtctaaaggttcacacctgtctctttatgtttaaaatacagataaggccatctacatcctcacaaagctgttccatggtgcaaattcctggtgaatctcctagtgctataagacttttaaactaagtatgtgcatctttaaaatataataacatgttaatgaataaaacagatacttaactataatacaaggttttacttagaattaaagaaagaaatctagctcgtttgaaactaaaattactttctctgagtttggcatcagtcagatgctactgcactaagctatactttattctctccataaaatgaggtgctgtgtatgagaaaatgagtctaaaactttaaagattaaaaaaatggtagaattctcagaatccttatttgggaagagaagttacatggggaaaaactgctattgtcaatgtccttaaaatggcaaaattcatagattacataaacatggagaatgaggaaaaataaaaacaagtaaatgatggaaaatgatgtgatcatttaaaaagcaggtgatataaaattaaatttaaaaaattcgaaattgtacctaaagtatgattatatatgttgagtgcaaatgaaaaggaatgtgggaaatgatttgtaaacatatttgtaatgtgagagttgttttccatttaaaaaatatatctgttaggccacggcaggaggatctcttaagcccagaagttcaagaccagcctgggaaacacaggaacaccccatctctactaaaaataattagctggttgtgctggtgtgtgcccgtggtcccacctgctcaagaggctaaggtgggaggatctcttgagcccaggcccaggctgcagtgagccactgcactccagcctgggaaacagggtgagactctgtctctaaatatatatagagatttatatttacatatatatatatatataaaactatatacttatatatgagtatatatatacttatatatatataactatatacttatatatgagtaaatatatacttatatatatttgtatgtgtttatatatacatatttgtatataaatatatacgtatatatttgtatgtatttatatatacatatttgtatatataaatatatacgtatatatgtatatatttatatataaatatatacatatatacgtatatatttatataaaatatacgtatatattgtatacatttatataaaatatacgtatatatttgtatatataatacatatatacaaatatacgtatatttcttataaatatatacatatatatttgtatataaatataaaatatatacgtatatataaatatataattatatagaaatatattttagaaattaacagatatatatatatctctctgttaatttttatactattatattgaaataaaaggcaacaacctggcatataacaacattccaagtgcctttcgttcccttttactgttcccaaacaggaaaaatgtgtccaatctttgtgaaatgagatgtcattttaagaaacacaaaggcaaaccaaacttacctggaacttggtcatttttcccctcctccttctgggaaaaggcagagttccggggaagtgaacctgagggagggaaaggcatcatgagataggttagggatggcattagtcaccatggcacttttatgtgacacttcagagaaaggtccccctgtctctaggcagacacagttgcacacggcttagtgaggagaacgggagctagctcccagctacccctcggccccctcaaccagctgcttttgttcatgaacatttcatattaacagacctaaatcaaatacagctctctgtgtactccttctgaactttagtttccaaggaaatgagacacagacaggcaggggaatgtaacagagccaaaatgcctggcttcaaattttggcatttctacctattttcaactgatcagcagtataaaccttaagcgaattattaatctctctgtgccttaattcagttacctgtgaatggggacaataataatgcctgtattctctatttcctgcagcttctgacaagcaagtgctattatgcttcataaaactgcccttttgagtatgctttctagaaaatgaatcttttaagaaacccagaactcaaaaataattgctctgtcctgtgagttaccattaccctcagaaaagtctgtaactgtgattggttgtctaacataattagttccgttggtaatgatagttaaactgccacaggtttttttttcctccaacagatgtaattacttgcaaatgttactaagctggaggagcctcaagaaagtctctttttccacatgcatgaaagcaatgactaataaaaacctaaaactctctaagaaatggtgttacacttaagttaaccacacgggattattggttataaccacattatactgaacatttattagggcctcaggacacctctggcactctgcaaatccgtaatgacgatcgcttatctgagataaaacacacaggacattccccaggctccgctggaactaattcctgtctcctaaacaagaggctagaaaagtccaagaatccaggaacggccccacatcaggcaaggattagagaagggacagcggctccgtagctggatctcctagactcagaggagtttccaaacaacaggcgtctttttcagtattataacagaattaacggtggcatccaacattttcctatgcactggttttaagcttatttctataaaacctcatttaattctcacaagaacatcactgggaacgcactaaccctttacaggcacgaggaaactgagacaaggagagattaagtaacttgcccaatattttactgcgaggagcaggcaggactggctggtaggtgcgtgaggacggctagggcagcagaccctcaacctcgaaggacgacgcgagcccgcctcccacgcaagaggttctgccgaggggacgcaaactcccgcagcctcccaaccccgccctccagcgctggccgcggcttctcttccccaagccaaggacgggttcattgctggccccacgcctaggcaaagagggctcggagaagtcttggagacccggagctgactcacctccctgggagatatctcagatccgacctcgccttcctggagcggaagtgcctccgagtgcccacggttcgtggactccacttcccagaattcctaagcggaagcgtctcagagttctctcactcctggactacagttcccagaatgctccaagggcagcgcttcccaccagctgggctttgttttgactcaagccggttgggtttgagccacttctctggtgctactactgtgagattcgtttttgttttattcatttttaaaagctcatgagaaaataattgtaaaatttttaaagtgatgacatataaaaatgaaaagtgcagcttgtattattaaaataagttagaaaccaaaatttttcgcagaagcagagggtaggctaaaatgggaagcgtaaaagtgacttaggctgagctccgatggacgctgaacgttaaggaacaccagatctcaaacttgtgtcaaatgccggctccccaaatatcatcaactcaacctgttgataagacaaaaaacagaatttattgttgattgcagtaatggagaacaacacttcgacggagcgttggcaccttcacagagcaaagtgtcaaggcaaggttggaactgattgagaactggatgtttaaggcgggtctttcaatgcaagggattttattagtattgcataatgatcatgatactacagtccaggattggtggatatagcaaggatttttgaagcaaagaatcttaaattgcaatctattgacactttctttggaagagattgaaaatttgatgggtctctgtggaagttcccataatgaacaattaaacagtttgcttgggcaggaatctcctggaataaaggcctgctgatgaagacagctgaacaatcatgttagtgccgaaagtaaattgtgatgaaacgggaaaagttcacttctccctctcccagggcatgtgatggggtgtggctcgcttcttcgtgcccagccgctcaaacctctaggggagcatgcacacgggcaggttgtagggctccaaccccacggcagtgtctaggggtgaatgtttacagctcctgaagccccagtgggcgtgtgttatagggtgcttttttagttcagccatctgtaggaggcttgtgttagctcaattagacccctgacttatcgcaagcaagagagggctttctgtatcccagaggttcttgccttggtgtaccagaagaatcgcatcacacataggcttggagaaagagtgcaaggattggagaaaccttggagaacgatttgtaagtagctctcagcagaagggggagccagaagggagatggttttcgcctggagtcagcctctcagcggcctgggcgctcctccgactacccaggccaaactgcgttattccaccggttaatggcctgctggcctgccggtctcttcagtgtgctcttttgccgacccgctcccctcgacagcctctcgacagccagctgtttgtgtgtccgccaatgctctcctctcaacgtccagcagcttgtgtctctgcctgctagggtatcagggtttttataggcacaggatgggggcgtggtgggccagggtggtcttgggaaatgcaatatttgggcacaaaggcaggaatgcctgtcctcacctaggtccgtggccacaggcctgggggtagagccctagtcagggaccacacccttctcccctccagcacttccattcccctcttccgtatcagtgaggggcagggaaagaggatggagttttagtccttagtgtccaagttgtgtatatttaggggtcggtgacaaggagagaagggagtaaagtgtttgactcttttccctccattattcctcaaggtacctaagggctcatgacagtgttttgtttaatgtgctattcgttctaatatactaagaacccacaaaaaggcaatataaatattaagccagagaaatatcttgaacttcatttattttaaatgtgtactgttatggcaaacaaaagcagctccattggccgggaatctaagacaacgttgtaatatgggcatgtgtaaaatcttgaattgttttctaatttgtgttcggcttcaaatatttcattacatactttgatcctgatcctgacataaatgaaattaagtgtcttatggttgaataaactagatgaaacaaagaagccgtgatttttctcctaggcaggtataaatatacaggtgaccattgaaaaacacaagggttaggggagctgacccctgggcagttgaaaaatctacctgtaagttttgactcccccaaaacttaacttacttaactaccaataacctgttgaccagaagccttaccaataacataaacaattaacatatatatgtgtatatatatatatgttttttgttttgttttttgagacagagtcttgctcttgttgcacaggctggagtgtaatggcacctcccgggttcaagcaattctcctgcctcagcctcccgagtagctgggattacaggcataaactatcatgctcagctaattttgtattttttttttttttttagagacggggtttctccatgttggtcaggctggtctcgaactcccgacctcaggtgatctgcccgccttggttggactgtattcttacaataaagctagagaaaataaaatgttattaagaaaatcataaggaagagaaagtattttttgctatttattaagcagatcatcacaaagatcttcgtcctcatcatcttcactgagttgaataggctgaggagaacaaggaagagaaggggttggtcttgctgtgtcagggatggcaaaagcagaatacaatgtatgtataagtggaactgcagagttcaaacctgttttgttcaaaggtcagctgtagtttgttacattttattatcaaagttttcaaacatatatagaagtagagagaatagtaaaatgaactctatatactgatatcccaaattcaataattaacactgtttagcctatttaattcatctatcactgtttttttagttacaattctaaagcaaattcctgtaattatgtcttttcacctcaaaatgctttgctaaatatattttaaaataaaaatattttctttcaaaaccacaatactattatcacactgaacaaaataccagttatttcttagtatttcctaatacttgacaaccaaaatgagtgactcaggcataagtctcagtcattgaggtttactaagccagctgtaggacctgccggggaaaaacaaagccacagacacatctgtgactatctttccaaagaggttttcgggaggtttagtatttgtcaatttccttaaaggggtggggaagggatataggaagaggggtaggtatgcagttaggcgaatagttacattcttgtgagactttagttagtccccaataaatctacatttttacataaataaggtgaatgtcttaaaaggaaaagggagtaaaagaagagtcaattatgtagatgtatgtggaggtagaggagagtaggtggaggaatgagtcttgactttgttctgcacctgggaagataaacttgtaatcaacattattgtaatcaccgagggttcttcttactgcctagaaaagccagtgcgctgaggacagcaggttttgaagcaaataaatagtttaataattgcagggccagccaaatagaagaatgggagatatctcaaatctgtttccctgagaattcaaaggctgggatttttcaaggatagtttggtgggcaggggctagggaatgaggaatactgattgatttagttgggaatgaaatcataaggggtcgaagctgtcttcgtgcactgagttagttccagggtggaggtcagtttcttggtatgggatactggtctgggtgacatcatctggtccatcagaatgcagggtttgaaaaatacctcaggcaccagttctaggttttacagtagtgacgttatctataggagcaattaaggaggttacaaatcttgtgacttacagctttgtgactccttgtggacaatttgttagctttacgaaggcagtttcagtccctaagcaaggaaggggttagttcc[138 bp omitted]gcctca[224 bp omitted]atagttagcttggcctatgcacaggaatgagcaagtacagcttgtggggtgagaaccaagatggagtcacttatgtcagatttctccactgtcatcatttttgcaaaggctctttcatgatcagtgtggagttttaggagctagacttagattgtagaactaaagcaacaattggcatgtgcctgtttatgagaggtcagcaaaaattttacttatgagtaatctatggggaaagctcttcccaaatacctgaggcttttcacctttcatggggatctggctaatgcacagctgttcgtttggaagagggtattgcaatgactgaactccagggcttaatctccacacttgcctaagtttggaggatcctgagatgtttattttcctttacatacccaatctctattaaaattttcctgattacctaaaaatatctcatgactggtttgtcaaatcaatatctagcccattcattttatttatctacttaggtgtatttattattgaacactactacatcactcctttgtttcagaccctgacctgttgaaggaattaggtcagttgttatgatattacacattccggatttctccaacttttctggcctctgtccctagttcctgggaggtggcatctaaactcttaaaatatcctgaattatagaagctctttgttattcacggtgggccactcacactatacctgacagattgtgctaaagaggtgacacatgatgggcctctggataagttatgctagtgagattacttcagataggtgctagttacaccagacagatcgatcatgtgatttgaagtttgggactatgagccaaataacaccagcctgtgtagaggatgggggctagacactgagttacatgtcagttcaatcagtcatacctacgtaataaagccccaataaaatctatgaacacaagcttggatagacttctatggttggcaagtattctcatacagctatgtgctgggagggtaatgtgtcctgaccccaagagaaagaaccatggaatttttcatctggaaccctcccagaccttgtcctatgcgtttctacctttggttggttttgatttgtatcctttttttttttaataataaagctgtagttaataaatataattttcctgggttctgtgagttgtttcagtaaattgttaaacctgagaggttagtgatcagaagtggtcagctggtcagaagtgagggtggcatggaaacccttgaacttgcagtttggaatgaaaaaagtcttctgagcactgtgcacttgaactgtgaagtttgacctaacactgagtaattagtttcagaagtaattacaccacttaataatatgggctaatacctttacgaacctcagggcagaaagtattttgtttagagacagggtctcattctgttgcctaccttggagcgcactggtgaaatcatcatagctcactgtaattttaaactcctgggctcaagtaatcctcctgcttcagcctcttgagtagctaggactacaggcatgtaccaccatgcctggatcattttttaacttttttttttggtagaaatgaggtcttcctatgtggcctaggctggtctctaactctcagcctcaagcaatcttaatcctcccacctcagccttccaaagtgcagaggattacaggcatgaccaccttacttgatcaaagttttcttaatatgtgcatacctgggagatattgcaggtttgggtccagaccactgcaataaaatgagtatctcaataaagtgagtcacatgaattttttggtttcttattgcacataaaagttatgtttatactatactgtaaacataccatttacctgtgtaatagcattatgtctagtggctcatgcctgtaatcccagcactttgggaggcc[135 bp omitted]gaggcaggagaatggcgtgaacccgg[138 bp omitted]acaatcatttgagccttctgtgagttgtgtaatcttttatctggaggaaggtcttcccttgatgtttatggctgctgactgatcagggtggtagttgctgaaggctggggtggctgtggaaatttcttaaaataagacaacaatgaagtttgcccccgtgatggactcttcctttcatgaaagatttctctgtagcatgtgacggtgtttgatagcattttacccaaagtagaacatctctcaaaattggagtcagtcttctcaaaccctgccactgctttatcacctaggtttacatcatattcgaaatcctttgttgtcattttaacagtggtcacagcatcttcactaaaagtagattccatttcatgaaaccactttctttgttcatccttaagaaacaactccttatcctttcaagttttatcatgaaattgtagccattttgtcacatcttcaggctccacttcaaattatacttttcttgatatttctaatacatttgcaccacctgagtgctactgtccatttcagagtctacttcccagggaatgcaacccgcaacaatgcttctctttgggcagcaggctcctttctctaaaggctgctaatctttggtgcatcacccagtcagtgcatatttctcttggtaccacgcttagctaagctatacttcttccacgtattctggattgagaaattgcattttccacttctatgatatcactgggtatttgttaactcaatttcccctattagtagtaatgatattattagtattaatatttttaaattataaaatcataatctactattttcttttaaataatactaaagataacagctaaaatctccttcgaccaccacagctgcccagtactcttctccattccctgtctttaaggtagagaccattatcagtttagtatctattcttatggactcttttttgtttgtttgttttattgtatttttatttattctggactctttattctgtattttatttatttattctggactcttttatatgtatttaaatgtgtagaatgtgtgtccttgtaagacttaaagaacatcattcatcttacatgctatataatattttgcaaatgtgcttatacagtttatatgaaagacacagaaattgttttcaatttttccactattacaacaaagctgcaataaacgtctcattcatgccctcctatgaggtgtgaccattctccatgggagaggcagaaaaattgcaattgctaggtcatgtggtaagcatatttaaacatttgatagctactgctaattaattcctcaaagcaattgcactagtttccactcccacaagcagtttatgagagtagcaaattcacc[131 bp omitted]tgaaaccccatctgtactaaaaataaaaaagttagccaggtgtggtggtgcatgacggtaatcccagctacttgggaagctgagacatgagaatcacttgtacctgggaggtggagattgcaatgagccgagaccatgccactgcactccagcctgggcaagagagtgagattgtctcaaaaaaaaaaaaaaaagaaagaaaaaaaagaaaaaactttgacaaccttaagggataaaaatagatctggctgtagttttgacttccctagttactaacatggttgggtacctttacatattttcactatcaatttgaacttttatttaagtgacttgcctgttcattatgatattttttctattatatatattttttattttttgcaatatgtattgttggggttgcctctctctgatttctaatcctttggttttgttcacacagtgaaacattatttatgtcacatatcgctgatagggatattcagctgtgtgggcacttttgttgtctccaaggaggtaaaaccttaccatagtcctaactgcagtatcacataaagggtctgaacacacacgtgtatggattctaatgttaagactcttgctattcttcaaacccttagatccctgtgttgggttggctgttattattgacttggcatcacaacaaccccctctaacaacttgtctgtattgaagaagaaaagcaagcatctacccatttcccaggatctccctcccaatatggttttacattacagacaacaatggaggagactgttatataatatttagcatgtggaagacaatgagaagaaaagatccaacttaaaatgggcaaagaatttcaacaggtagtcctccaaagaagtgtccggtacacacaaatggctaatgtagggtcctccagttaccctctctttctgtgtcctgaccaaaaatcacagagtgccttgaccactctgtgacccagccagctgcacattttttttccagcaggcttgaacccaaaccggggccttaaacattcccagacattgataaaggcatctaggttgttgcccaaaatactgaaagaaactggccctggccctggaccaaattccttaagcccccataaaaactccataccctgattccctcgctgtgaacatacctaggtagaatgacccttttctttcactgtccatcacaagaattgcttgcagccctctttaagttccactactaaatgttttggactgatcacactggcatttagtgtttctttctttagaatcccaaccagccccatctcaggatggtttgggggtactccatggtgggaactcccctgccactgcttttggggcaattccagccatgggtttggtgggatgaaccagctaaatagcacatgaaaacacgctcaatataatttcattagggaaatgcaaataaaaattgcaacgtgataccacttcacacccactagaactcctgtaatgaaaaagacaagtaataacgagggttagcaaggatacagagaaacgaactgccatacattgttggctggaatgtaaaatggcgcaactcttttggaaaacaactttctcatatacaattttccatcagtctttccttttctctctttttgccctccacagacttccacctcacatctctaaactctaccctctgtaattcccacctctcttttcaggattttaggatcaaatcaaccatgcttttcttacacccctaaaagaaattacattacctagacccaaatcagtctgaaatagaaggcactcgaattgttgtttggagagatctcagagtggattcctatagccatactcttgcttttactctcaataatcattattagtttttggcagtacttatggtaagacaagtaacttttaattctgttgaaaccttaactctgggcctctatagggcatcattgtctttgcaaacatttactgtacacctgtaatgtataaagcaccatatttactcttaaggagttcccactctactgagctaaaaatgctataggactgtgaggggaactaaaaaagcaaaacaaaccaaatccaaaattagtaaaaagaaagaaataataaagatcagagcagaaataaatgaaattgaaactataaaaacaatacagaggataaaatggaaagattttttttgaaatggcaatgttcataagcctttagctagactaagaactgtgagaaataaggacaaaatattagccatatctaaactgctattaatcccatctgttaattttttttttgagatggagtctcactctgtcaccaggctggagtgcagtggcgtgatctcagttcactgcaacctccgcctcccaggttcaagcgattctcctgcctcagcctccctagtagctgggactacaggcacaagccaccacactcagctgattttttaatatttttagtagagatggggtttcaccatattggccaggctggtctcaaactcctgacctcgtgatctgcctgccttggcctcccaaagtgctgggattacaggtgtgagccaccgtgcctggctcccatctgttaaattcttaatgtcagtcattgtgttgagctttctaggattttaaatttttatataaccattttttaaaaatggatcttttaaatgccacactaagcataaacttttcaaaaacagaaccaagtgattacttttagttttcatttattttctttaatcagttgttttaaagtttgtgcccgctaactccaatatctggatcatctggaagtccgtttcaactattagaatatcatgcttatgtacagtttcttttgcctgcagtcttaaggaatctactcattccccaagtttgaatgtttatattgtcttttgtttttgttttggcatttggccaattttctggcaagccccattaatttttgttgaatgccaggtattttgtataaaaaatggtgttgactctagataatgtaatcttccttcagaggatctaagttttcttctggcagacagaggacaggcatatcacaaactttactcacatgatgttgtgatccattatttttgacttggagaatatgaggattttcattttcggcaggacaatgagccaatatagataaaatttaaaacacgtctattcactcaacaaccacacatttaaatgttctatggagatgatgaatataaagagatgaaacttatttttctctggtttttattgcattgtggtttagaagagtgaaaaacagtaaacaggccttcaatagtaagaaattggttaagtaaaaataacacattaatacacaagaataccatgcaggcattaaaaattaggttgtaggtcatttaaatttttttctcagtttattgttttgtttcttatttttatgataatttaatacatttatgtaatttgtaaaaatcaaatcagtgtacttggaatatccatcacctgaaatatgtgtcctttctttatgctagcaccattctaatgcttctcttctagccattttgaaatatacaatagattactgtaaactatagtcaccctactaatctactgctaggtcttatttcttctatcaaaccatatttttgtacccattaatcaacttctcttcatccctcctccctactacccttgccagcctctggcaaccagcaatctactctctatcttcatgagatccactttttttagcttccatatataattgagaatatgttatttgtccttctgtgtttggcctatttcatttaatataattactcccggttccatccatgttgctgcgaaagatggtatttcattcttttttatggctgaagaatattccattgtgcatatatacaattcatccattaatgggcagttaggttgatttcatattttgcctattgtccatagtgctgcaataaacatgagattgcaggtgtctttttgatatattttctttctttgaatatatacccagtactggaattgctggactgtatggtagttctatttttagtttttaaagaaacctccatactattctccatagtgattgtaccaacttacatccccaccaacagtgtacaagcattccccttttgccacaccctcaccatcatccattattgcctgtatttttgataaaagtaattttaactggagtgagatgagatctcactgtggttttgatttggatttctctgatattgatcatttttttccttatacctgttggtcacttgtatgtcttcttttgaaaacatctattcagatctgttgcccattaaaaatctgattatttggcttttttgctattgagttgtttgagctccttatatattctgggtcttaatccctggtcagatggtcagtttgcaaatattttctcccattctgtgggttgtctcttcactttttaaattgtttcccttgctctgcagaagattcttagcttgatgtaatccaatttgttaattttcactttggctgcctgtgcttttgaggtgctactgaaatctttgcccatatcaatgttgtgaatcatttccccaatgttttcttctattaatagtagttttatagttttaggtcttatatttaagtctttaatcaattttgatctgatttttgtgaaggtgagataagggtctagcttcattcttttgcatatattcagttttccctgcactattaattgaagagactgacctttcttccattgtatgttcttggtgcctttgtcaaagatgagttaactataaatgcatggatttatacttgagctctctattcttttccattggtctatgtgtctgtttttatgccagtactatgctgtttcagttgctgttgttttgtagtatattttgaagtcagatagtgtgctgcctccagctttcttacttttgctcagagttgcctttggctatatggcatcttctgtggttccatataaatgttagaattgtttttgtctatttcagtgaagaatgtcattagtattttctttttttaaattaaattaaattaaattaaattaaatttatcactattatttttcttgagaaggagtcttgctctgtcgcccaggctacagtgcagtggcgcaatcttggctcactgcaagctctgcctcccaggttcacgctattctcctgcctcagcctcccaagtagctgggactacaggtgcccgccaccatgcccggctaattttttgcattttttagtagagacagggtttcaccatgttagccaggatggtctcaatctcctgacctcgtgattggtctgccttggcctcccaaagtgctgggattacaggcatgagccactgtgcctggcctgtcattagtattttcataggaatttcattgaatctgtaaattgcattgagtaatattgtcattttgacaatattaattattccaatccatgagcatgggctatctattttttgtgtccttttcaatttctttcatcagtgttttagagttttccttggatagttctttcactactttggttaaactcactcttaggtattgtatattctttgtagctattgtaaatgggattgctttcttgatttcagattgttcactgttggcatatataaataatactgattttttatgtttattttgtatcctgcaacattactcaattttcttatcagttctaatggtttttgatagtctttagtattttccatttttaataacatgtcatctgtcaacaagactaatttgacttcttcctttccaatttggatgccctttaatttctctgggaactggagtgctaaagttttctcagtgttcctcccacctaattgttctatgcaggatttccagtactatctatattgaataaaggtggtgagattaggcatccttgtctttttcaagatcttagaggaaaggccttcaattcttccctgtcagcacaatgttagctgtgggcttgtcatatataacttttattattctgaggtatgttccttctacacccagtttgatgaggatttttatcataaagggatgttaaattatattgaatgtttatttttagcatctatcaaaataatcagatggtttttcttcttggttctgttagtgtgacgtatcacacttatcaatttgcatatactggatcatccttgcatccttgggatgaatcccatttgatcatggtgaatgatctttttaatatgttggtgaatgatctttttaatatgttgctgaattcagtttgctagtattttgttgaaaatttttgcatctatgttcaccagtgataatgtcctgcagtttttttttccattgtgtccttttctggttttggtatcaggatactgttggccccatagaataaatttggaattattcccttctcttcaatttttgtgaagagtttgagtagaattggtattagttctctaaatgtttggtagaatttagcagtgaaaccattaggtcatgagtttttccttgataggcgactttttattatggcttcaatttcattatttgttactggtttatcgaggttttctatttcttcatagttcaactgtggtcgattgcatgtgtccaggaatttattcattacttctaggttttccaaagtgtatcattgttcatcacagtctctaatgattcttatttctaatgattcttatttttgtggtctcagttgttaagtctcctttttcatttctgatgttatttacttggatcttctttctttcttggttagtttagccaaaggtttgatgatttctgtttatctttttaaaatcccaacttttctttcatttatcttctgtattcttctttcattatcaattttatttatttctgctctgatctttatttattttcttctactaattttggatttggtttgttcttacttttttagttccttgaggtgcatcattaggttgttatttgaaatctttttacctttttgatatatgtttgttgctataaacctctaagttttgctttggctgtatcccatagattttgccatgttgtatttctattttctttgtttcaaaaaatgtttaaatttccttcttaatttcttcattgcctcactggtcattcaggagcatgctgtttaatttccatgttgtttgtgaagcttccaatgtcctttttgttattgatttctagtttaattatactgtggtcagaaaagatactgaatataatctctcttttttttttaatttgttgagatttgttttgtggcctaagatatagtctattctggacaatgttccatgtactgatgaaaagaacatctattctgcagcaattgggtgaaatgatctgtaaatgtcagttatgtctattaggtctagtgtgtgacctaacttcaatgtttctttgttgattttctgtctggatgatctgtccattgctgagagtgggatgtcaaagtctcctactattattattttgccatatatctcttattttcgatctattaatgtttgctttataaacttcggagttctggtgttgaatgcatagatatttataatggttatatcatcttgctgaattgacccattaatcattttatagtgaccttatttgtcttttttacagtctttgatttgtagtctatattgtatcttatacaagtatagctactcctgctcttttttcgttgcctgttgcaagctatgtctttttccaccccttcacttttagactatgtgtgtctttacaggtgaagtgggtttcttgcaggcagcatatagttgggtcttgtttctctatccattcagccactttatgtcttttaatcagaggatgagtcaatttacattcagtgttattattgattagtaaggacttactactgccatttgttgcttgttttctggttgttttgtaactcctccctttctttcttcctttcttactgtcttctttttttgcttaaatatttaagagtcttcatttttctgtcttcctttgtggttaacagtatgttttaatttgttgctttttacttttagtgaatctattataggtttttgtattgtgtttaccataaagcttacaaaatacattttatagatataacaggttattttaaagagatgacaacttatcttagattacaagtaatagaaacaaagaaaaatgaaaagaagaaacacttctacacttaactcccatccgtcccaccttttgatttttggttgtctcaatgtacatatttttatattacctatttcttaacaaattgctcttgctattattctttttgatagatttcttttgggctacatactagttatgagtggattgcacatcacaattacaatactattcttggtttgtctgtgtacttaactttaccactgggttttacagtttcagaagctttcattttgcacattagtagctttttctttcacattggaaactcccttgaacctttcttagaagtctgttgtggtaaattctctcatcttttgtttatcttggaaagactttatctctccttcatatttgaaggataactttgctagatacagtattcttggatgatagtttttttttttttttaatttcagcactttgaaaatgtctctgcacttcctcctggcctatatggcttctgttaagaagtcttttgccagatgaattggagctcctttatatgtcatttgcttgtttttttttttttttttttttttttttgctgcttttataattctttctccttgacctatgagagtttattatatgctttggggtagtcttagttgggtcaaatctgtttgctgttctatgatttccctgtacctggatattcatctctttcttaaattttggaaagttttctgttattttgttgaatatactttctactccttgctcttgctcaactccctcctgaacagcagtaattcttagttttggtcatttgagatattttctatctctttcagtcaatatttgctctttttctttctctgttctcttctgactgtgtattcacaaatagcctgtcttggagctcactgattctttcttctgcttgatacattctgctgttgagagcctctaatggatatttcagtgcagcaaacatatttctcagttccaagatttctgtttgattttaaaaaattattttattctctgttcaggttctctgatacatttctgaattgcttttctgtgttatcttggagatcactgagtttccttaaaacagctcttatgaagtcttggtcagagagttcacatatcgtcttcctgttaggatcagtcactggttccttgctttgtccatttgtgggatgccatggctccccgtttgctgttgttgcttatggatgtgtgtctgtctttgcatcgaatgattatacattccactattctctgtctggctggttttgtttttcattggatatggctccctagagattctttatattttacctgttgattttcttctttcccgttaggttactgactcctttttggtactagatagcctattaactccaggtttgcctcagttctagtaaataatcatagtgccacccatcccaaaaggggtaggtcccataggggatatcctagttgtaagaaagctggctagtggttcatgattggggacctacagtatagtgatgctgaacagccactctgattgttgtctcctttggctgagttgcagagtagagtttccatgacggggacagtattcccacctccctcctttgtctctggctgtcctcagggatatttctctcttcagttactcctgatgctttctgtgggttgagtcagggacaagtctcctgccaggaaacccaagatggggaggaggctggttgtccaccttgattaactttttccagtatagaaaccgtgagacgggaaaattttccacagtcttggcaccaggcagattagggggaagggcactgtggataggaaagtccacttctcttatcatctgctcagttttttccacttatttgtgtcctcaggaactgtctccttctatttgagttctgggatattgctggtgataatcttggtgctgtatatttgtctttagttttctattgaaaggagtgaagccagcttgcttctacattgctatttttggaaccagaatttaatttctactactgacttatgagatgtactttaaaaaattcttaaatggttactctagggcttaaaatatattcctgtattttttcacagtctatcttcaaatcatattatgccaattcatgtatagagtacaaccatatacctctaatttctgctagtatatttctaatttctgtcttccctgttttgcagtgttcttacgaaacatcttatttttgtatgtcctctaaattcataaaacctcattcctaattttgctttactgaattatattttggagtaataaaaataaaaattattttacacttaaaatgattgaaataactattttcatagttatgtcttttggtagatccaagtctatttctggtatgctaaatatctcttacagtgcaggtctgctaacagtgaattctatcagcttctgttcatctgaaaatgcctttattttgcataccttctgaaagattttttccaccaggcttagatttttgattgatcattttttttattgttgtttctaaatgttaaagatgtaactccattgtcttttgcttgcatggtttgtgatgataagtctgatgtttttctcactctgcttcttatatgtaatgtgtccctttcctctgtctgccattaatattttctttgcactgtccatccatttttagctattgggcaataatacctctagttttgttctttttttaaaaaaatactgctttggtattctgacgttcttgaatctgggtgaagtcttattatttttggaaaattctcagccattatctctttaaatatcttttcttcccattctctcccccgaccctgggtttccaagtatgcaaatattagatcctacaatgttgtcctatttgtattgttttcttcacactttttctttttgtgttttagtttgcatgatttctattgacctatattcaagttctgacacttttctcaactatgttgagcctactcataagtccttcaaaagcattctgataaaagtaaaagcagtagcataaattttcttttcctagcatttcccatttgactattaaattttactgaaatccctatctgctcatgcatattatctgcccttttcactggagtcttcagcacatcaatcagttatgtaaaattccctaatagttccaaaatatggttatctataagtgtggttttattgattggtctgctatctattggcagaagattgttctcaacttttgatcttgtgtttttaaaataaaatgccagataacatatacaaaacagtagagactgaagacaacattattttttgcctaaaactgggcacacatgttctgctaggatgtcagggtggagtgctgaattaatctggtcaggaatcaagctggaattgggttttgttgttgcaatatttatcttagttgtaccatggcttcaaatttctctagtgttaccttgtgcttagggtgggaactggagtgctaaagttttctcaatgttcctgttgccccatcctcagcttttggccatcccttggcaccagggccaagaaagattctccatgttcttcccttttctcacggtagcctgctgttgcttctcactaggaataggctaggggaccagcggtgtcctttgttgtcttggttagtctcagttgttagtgggaattggagtgtcagagattctatgcattttggggagccagaaccacacaggactaaaatggtacagaatatctcttccttcggctgtgaaaagaaagcaggtgatgctgctatattgtgaacaacatgaagacaagaattcacaagaaaagagaggtgagagaattaaaagaaagcaatataaaatccccctaccttacccagaccctagtcttacactatctgtatcttttcatttatatgaactaagaaacagttttggtttaggcaactctaaattttctgttacttagaactaaaagcattccaattgataaaaccaccatgagctctcccctgtaagtgatgatatcaaagacatgctttagaagccctggatttctgatgatactgtgcaacttgaaccagcacctcaaaagccaagttatgccagtgctttggtcatcatattcatccagcaaggggaaatctgatggaaaagccgtgagcatcaatttataaaactggattgcactaggacatcctaggcaacatggattttgagacctaaggaaatttcacagaaatataaagttatggacacctaatttatctgtattcttaaaaatccaggaaattttaagaactaacttcagggggtttattctttactgttgttggtcataatgtcatacagtgaaatcaagcaatcatatcatgagttcttaagtataagagataatatatcaatagctgtttactgctttggtgtaattggtaaatgtccattataaatatttttaaataaagcacagaaaaactaagccaaaaatttctttccagagaaaactactgtggatataataatgagtaatctttcacacattatctataagcatatatttgaacatacatgcacacaggcttaaattagctggctattatgaacgtacagtccaggtttttactaaacaatatgcatgatccattcttgtcattttagagctaaatcatactttctgtagatccatagtatagaacatacagaaacttacccaaattcatattgatggacatttacttccagcttaaaacattactatcattgtaaaatcctttcttactgctaaaattgcttaattataaattactgttctacgatttccagatcggtatgcacattttacattccgatatatatggggggcttgataagtattttgatatatatagaacgacaagcttgtatttttcactttcgccaacaaaatgcatcattcttgaagacagacactagcaagtaaatggcaaccctatcctgctagtcaatacattgataaatatgcttagaaaaattcaagattttccctttttttgtgtgtgagtgggagaagtatgggaatggaaaacttgacaaaattaaaatctttcaaacttgaccctgcttaaggaggtgtggattggacaaaggctacaacatttagaaatcagtcagatcaaatggacttttagagaaatatggagaataaaaaaaccccaagtattgtgattttgacatttattaaaaagtatttgtcatcagtaaccattttggatacttgcaaatattacagtaaaactctgccttaattcacagggcaggagtagaaaatcaattatgtaaaatacagtgttccatttttgcaacattaaccagaaacattgtttatcagtttgtactgatatttcaagtgcacacatgggtacatatacacacacacaaagctaaacttcagcagatggtataatgtatagagaccaaacgttaagaaatgcagcacatctctgctcaagatggaacaaagggtgggaactaaccccaatagggttacaatcaaattaatgttatttcagatcatcataatgcttattgttctacatttcaaatatttacttgaaatgattttattaagattacttgcaggatttctcctccaaatacattttaagttttaaaaaatgcgcttaaaaatttcaaaccttttacctttacatacttttagttatttagcaaaaagtactgagcacctacattgcgttatgaaatgtcctagttttgtagactagcaatgaacaaagtcccttctttcaccaagcttacattctagagaacatggatttaggcatgctcatcactgtacttttattaaattcctgaccatactcatattttataagccttagctcctgtgcaatgactgatgttaaagttctaacaaaatccctcgtgaaacccctctcattaaatgtctctgttgtgtggtctcctggccattatgaatgttgaagttgggcagcaacattacattttaatttttaaaaattctttttctactgaaagaactctagtgactggaaaatttcagctcccatttgaggacttcaaaacaaaacagaatcttcatttctgtgtagattctctgatgaagggtagtccttaccatagtcttcgcttttatagaatttatcactactatggactctttgatgaatgagaagacctgagctccaacggaaacccttaccacatgcatcacatttgtatggtttctctcctgtgtggactctctggtgagcctgaagatttgatctctgactgaagccctttccacatacctcacatttgtatggtttctctcctgtgtggactctgtgatgggcttgaagacttgaatacccactgaaacccttaccacactgttcacatttatagggtctcccttccacatgaaccctttggtgtgcttgaaggcgtgaactctcactgaaaccctttgtacacacctcacatttgtatggtttccctcctgtgtgaaccctccgatgtgcttcaaggcgcgaactctgactaaagcccttcccacacatctcacatttatacggtttcactctagtgtggactctctgatgaccttgaagatatgctctctgactgaagccctttccacatacctcacatatatatggtctttctccagaatggacactctgatgactctgaaggtatgatctctgactgaaactcttaccacactcatcacattggtatggcttctctcccgtgtggaccctctgatgggccaaaagtgttgaggccttactgaagcctttaccacattcttcacatttatagggtttttctcctgtgtgaaccctctgatgaatttgaagattaaagctccaactgaaccccttcccacattcctcacatttgaatggtttttctccagtgtggactctctgatggccttgaaggtgtgaactccgactgaagcccttcccacactcctcacacttgtatggtttttctccagtgtgaactctctgatggccttgaaggtatgaatttcgactgaaccccttcccacattcctcacatttataaggtttttctccagtgtggactctctgatgggcttgaagatatgaactccgactgaatcccttatcacattcctcgcatttataaggtttctctcctgtgtggactctctgatgaacattcagaactgatctatgattgaaacctttgccgcatatattgcatttgtatggcttctgtccagtgtggactctctgatgatctttaagttttgagctccagttgaagccattcccatgctccttacgtggtttctctccaatgtgaatttttggatgaccttgaagatataaattatggctgaagctgttactacacacatagcgtttatatggttgttccttagtgtggactatctgaaggtcctgaaaatgtgaggccagactgaagccattaccacactcctcagaattatatgaattctcttccatatgaaccctatgctgaatgtcaagatttgaactacaaatgaaactctttccatactctatatctgtgtatagtttctcttcagtgtggattttttgatggacttgaagacatgaactctgattaaagacattctcattttcctcatattcatggggttcatccctagtatggaccctaaaaatactattaaggtctaagctatgactgaaggctttctcataaatgttgtgcctataggacatctcacctgtgtggataagttcataagtgttaagaggggaacagtgattgaagttctcaccatattcaccacatttgcatggtttctcctctgtatgcactctctgataggatttcagatgtgaattctcaatatcatcttctctctcaatattttgatgaatatgaagaagtgaactataattacagccctttccacatgaactgtatgtatagggcttcccttccaagtggaactgctgatgaacctcagagctggagtcattactgaaggcttttctatacccagtacatggatagggcttctcctctgtttgaattgactcctgattaagtaatgataccttcatgatatcttctccacagtcatggcagctgtagttttcttttctgtgtacttccagtttatcattgtgatgtgagagccaactgacactgtcacacttacagaaatgatttttcatggaaatttgctgacatctacactgataattatgtgactctttcagatacattttcctccaagaatgatgtgccctccaagatggatacccttgactttttatataattggagccattccctatatgagtgaatatatagttcttatcttcagaaatctgaactggtattcctgcccaaacctggccgagggaattaccttgttcttgcaactgagaattcttcccttgaaaaactttcaggaaatcttgacacctgattaacccacctgcactttgttgccaggtctgacgggaggaaagctctttgggggaaaagtagcttactgttacttcctgaatactctccatcttttgttgattcttccttcctataaggataaagagaattcagatgtgcacgagtgaatgctttattcaagagatttgaagattttacacttaggtcataacatgaaacttgaatgaaccagaggaaaattcatgccactatttctaagaatacttagaaaatatctcctctttggctataccagttacaggttgagtattctcaatccaaaaatctgaaatgtgaaatgctccaaaatccaaaacttttttaatgttctacatgatgttcaaaggaaatactcattggagtatttcagatttctgattagggatgctcaactggtaagtataatgcaaatactctaaaatctgaaaatatttgaaatacaaaacacttctggtcccaagcattttggagaagggatatttaacctacatacaaatagcatctacataattcaggatatctgatgcctcaaaatcaggactttgcagcacgacctggacatcgaacatgatggctgtgttcaaaaggcttagtaaaaccataaacatggctgggcatggtggctcatgcctgtaaccctagcactttgggaggccaagtcgggtggatcacctgaagtcaggagtttgagaccagcctggccaacatggtgaaaccccatctctactaaaagtacaaaaattagccaggcgtggtgttgcacacctgtagtccccgttactgaggaggctgaggcaggagaataacttgaacccatgaggcagaggttgcagtgagctaagatcatgccactgcactccagcctaggcaacagaatgagatcctgtctcaaacgaaacaaaacaacacaactataaacatgttatcatggattaatcatgggtttccaggagatctgaaggggaaaagaggatgttcttaaaactggaaaaatatagttgcaaatggacaaacgccttttgtcctaataagtttttcttttttgtctggcacataaacatgataatgttgttcatttgtaagtgtactgtgtgcgttaaatgatatgctgaagaaggtaaatacagacttttactttatgtttgaggcatcacatatcctgtcactaatgagctatttatcctcatgagaataataagctcttcttcagattatgagactaacgcgctgccagctgcgctaagagggcttagagaataataagctcttctaagtccctgtaggccattacagattttaactcttttcaaaagatatttcacaattatcaacggccatggtgtaggtcaaaatgtgaaagactgtgacagaattcaactaaaaaaatcagaaaaaaattatggcacctgtaggtgtcctctgaggtgctcattagccaggaacagaactcaatgaatactgacttttgcttgtgccattttactggaaaattatgttagtgtttaggaaatttgaggcaccagaaagggttgaagacaggatatttgggtagaaatagttacctagttattaaagctcagattataagcagacagcagatcttcatatactagtgacaaatatcctccctaaggacaactggttaaacagggttgaattaataacatgcattcttctaacacttagaagtagattaagtctctataatatccagaagaaaagcagtaaaagggatgttttttcatgaatattaccctcaaacataattctgccttatttctttgtgtttgtctgcctctccacactggaatgtattatccatgaaaacaaacactgttttgtgcactgcattcctttcactgccaagtgaacagtagttgctcaataaacattgatgaataaatcatagtttgagttgctctcactcatagaactaaaagagcatgtaatgtagctttttaaatgggaaaggaactggtgatggtggcaactttgctggaaagctgaaaggctataggagacgtagggcgacaattcagagtgatactgctgatgagaaaagcaaaggtcacaagaatctactgtggatgaaataaaaatgtaagatcaaaaagacccataggcagggcctgtggattgagtctttctcatttttaaagtaactttttaaatggtacaactgtgagccaggcatggtgacgcaatcctgtagacccagctactcagaaagctgaggcaggagaaatgcttgagcccaggcatctgaggatgcagtgacctattaatataattgcacctgtgaacagccactgcaactccagcctgggcagcatggcaagactctgtctcaaaaaaacccaaaatggtgtaatttttcttgaacaaaatcttacccgtaagccctaccctatcccaacttttaaaaaaggaaaaaagaaaaggccacactgatgaatctgtatcactaggctctggggcagcacactgattgtgggataacacttcaaggtatatcagtaggtatgcatcttggtactttaaaagcacatttactgatgtctttgccttctcaaaagtgaagctttcagttattataatgatattttatcatataatgatgaaatgaagggatatattataggaggcatatcagataaagtatatagcttatatgtgagaagtttgagcttccagctagggttaatcataatccttgtagttttgttttactattataaaaaacactcaatatacatccataaagatacagtttaatatgtcctgtcttttgggactgatgtagtggcttgagaacatgaaagtagcttgttagtcaaaacccaatttctcacaaagcaactgtttcaatgcaaattagtacataattcatgatataaaaatctctcaaatatatgagattaaagtttctctctgagcagtgggttttgcaatgttaaggacatagaggaagaaaaaaaataaaaggtcatttcactttgtttcacactcttctaaaaaagaccacacatgtaacaacattaatttcctttagtcaatggtatagaccgaaacaccttgttactttatttaaataactcaacatttaagttctatttcaatatcaatggtagaatggtaataagaaattgtgttaagtttataaatgaactttatttgatggagaaactaagcatgacaaaagatgccgaagacatcatttgaggtaagaaggttgagaatttattacatcttcatagcaatcctgctttagcacttagaggttgagaaagtcaatgattcaagcaacccaaattgatcaattcaataacaaaggtgctatatttgtcataaagacaagtaattcctttgaatttaatagttagctataatgaactcagagaaaaaaaatctttgtttatgtcttcttcttcttcttctttaataaaagctaagcgagaacatcagctcaggttacccaggctgagatcaccttccgttcttacttcgcttttagatagagacaatacaaggtatagtggtgacaatgttttgatcacaaatatttaagctgctgtgctgactcctttcttaaccactgatatggtttcgctctgcgtccccacccaaatctcatgttgaattgtaattcccagtgttggagttgaggcctggtgggaggtgattggatcatgggggtgctttctaatggtttagcaccatcccccaagtgctgtctcgtgacagagttctcaagagatctggttgtttgaaagcatgtagcacttcctgccctctttctcttcctctttctctgccatgtaaaacatgcctccttccccttcaccatctgccatatttataagtttcctgaggcctccccagccatgcttcctgtatagcctatggaaccatgagtcaattaaacctcttttctttataaattacctggtctcaggtagttctttacagcaatgggagaatggacgaataaagaaaattggtaccagaaaagtggggcattgctataaagatacctgaaaacgtggaagtcactttggaaacaggtaatgggcagaggttgtaataatttggagggttcagaagaagacaggaagatgagggaaagtttggaatctcctagagaattgttacatggttttgaacaaaatacggatagtgatatggacagtgaagtccaggctgaggtggtctcagatggagatgaggaagttattggggactggaactggtgatatatttagatatatttaggtttgtaaatgcatttatacattttcccaacattggtgctatgctttagcaaagagactggcagcattatgcctctgctccaaagatctgtggaactttgaacttgatagggatgatttaggttatctggtggaataaatttctaagcagcaaagcattcaagatgtggtctggctgcttctaacagcatatgctcatatttatgggcaaagagattatctgaaactggaacttatatttaaaaaagaagcagagcataaaaatttgaaaaatttgcagcctgatcatgtggtagaaaagaaaaaccaattttctggggagaaattcaaggctgcagaaatgtgcctaagtaaagaggagctgaatgttaatagccaagaaaatggggaaaatgcctccagggcatttcagagccagtcatgacagtccctcctaccacaggcctgaaggcctaggagggaaaaatagttctgtggctcaggcccagggccctgctgttttctacagctgaaggacacggcaccctgcattgtagctgctccagttccagccatggctaaaaggggccaaggtatagctcaggccattgcttcagagggtgcaaaccccaagccttggcagcttccacgtactgttgggcctgtggtgtgcagagggcaagagctgaggcttgggaacctctgcccagatttcagaggatttatagaaacacctggatgtccaggcagaagtctgctgcaggggtggagccctcatggagaacctctactaggtcaatggagaagggaaatgtggggttggagcccccagagtccccactgaggcattgcctagtggagctgtgagaagagggccaccgtcctccagaccccagacccaccaacagcttccaccacgtgcctggaaaagatgcaggcactcaacgccagctcatgaaaatagccaagtgggctataccctgcagagccacagaggcagagatgcccaaggccttgggagctcatcccttgcatcagcatgcctggatgtgagacatggagtcaaaggagattattttcgaactctgagatttaatgactgccctgctgggtttcagattggcatggggcctgcagcccctttgttttgcctgatttctccctttcagaatgggggcatttacccaaaggctgtagccccattgtatcttggaagtaactagtttgtttattagagtattatgcatccattacaaaaacaagagttataatcttagactgggagggatttccccaaggtaacggcaaagaagaaaaattagtatattaaaaacaagaatgtacataacaaatttttacattaatatgaggtatatgatcatgttagtataggtaaaaaaattaaggtattttaaaaggtgacattatgttccagctgacagtatcaggaaggtagactggcacagcatggcctcggcctgtttctgtacaacccaggagccaagaacgctttctacatttttaaagtggtgtaagaaaaacaaagactgtgacaaagagcacatgtggccaggaaaatctaaagtatttactacttggacctttagagaaaaagtttaactcctactctcaagggtaccatgtaggaccctgaatcttaaccaagatggaaacaaaccattatagaaatgagttaatttgttttgaattttctgttgactctttcttcttatccagcagcatccttagctacacagttgcgacggtggcttttgatgtcagtcttgaggactcaagaaactatcaaaatgtttggattcacataaatgtccaacttgaagattctactttaagactgtggctatgtcaagagattgtttgggtgcgagagtatgggacagaatgggaggataagaagatggacatatgaatacaagggtgtctcacttgaaaatgctgcatgaggaagaccagttataatgttggcattggtcatttttgatacttactttagctgattggctattcttatcttttaggattaatggctacccatctatgaatactcaaggacagctaagcagttaaaacaggcatccatcagatgagaaacagtattctagaatacccttcaattacacagatttattctacacctattagctgcctcagggtgaattgaagagagcaaagatcatgcatctattacccaattcattcagagagaaaagcaagtcaaggaaattgacacagaagcataattgagaggtctgagggggcaatcatggggcagtgcctctgaaacagactgaatgagcaaaaacaaacaatggtaggtgaatatggaaagtgagaagaggttgaggggacagataccttaggacctaatagaccactttaagtactttaaacttactatgtgtgaaatggggagccacaggaaagcttaaacagagaagtgatgtgttctgactcatgttctagaaggggctccctggctgctgtgttcctgcagcacagttctcacctgaacatccatctcttggggtttctgtctccaccatcaaaagcttttcttctctctccagctgggatattaggtctggcttgaagggctgatgtgctgtaaagaaggaaaggacagcaaaagtttttaagtttgatgacattcaattggtcaaaactagacaaaaaggtatacacagacaagtgagactctctcccacatcccttccaccctgttaccttccactcactataagaaactaacttcatgattttcttttttttttttttaaataggctctcacttttctgcctgtgccagcatgcagtggcatgatcacagctcactacaactgcagcctcaacccctgggctcaagcaatcctcccacctgggcctccagagtagccgggaccatgggtgtgcatcattatgcccagctaaattttttgtagagacagggtctccctgcattgcccaggctggtcctgaactcctgggttcaagcaatcctcttgccttggcctcccaaagtgctgagattacaggtgtgagccaccacgcctggccattattttcattaaaccttccttcttgtgtttcttcttataaaaataagtatatatataaaatatatattatttttatatattacatatatttttatatatattatatatatttcatatatgtataaaatatatatatattttgtatatgtataaaatatatatacattttgtatatgtgtaaaatatatattattatatatattttatatataataatatatataatatatattttatatataataatatatattatatatatatgtctgtacccacacactgtctatttacttattttaccttatttcttacatgaattgtagtatactattaatattcttttggacatggctatttttagggaaaatccccagaaatgggttgccggggaagggtaaatacctagctttgttagatattgtcaacttcccctccctaagggttgtatcattttgcattcttcctttcaacgcatgaatgttcttcattccccacagctttgccaaaaaacgtatagtgttacgtttttgaatttttgccaatttcatgggtgagaaatggcatttcagtataattgtaatgaacatttcttttgaaataaactgaacatctattcatatgtatacatatttctatgtgtgtatatgtgtatgtatatacatacacatacacacacacacacacacacacacacacacacacacaccctagctctatgtcctgagacaaagaaacatagatcatagatactacagtgaccatacctagcatccagactttggcattaaataccattccccagttaaaaaaaaaaaaaaaaaaaaagataattccagagccaaggcaaagtaaagatgagcacaaaatactgttctctgccaacaaagtaagaaagtgctcaaaaaaaaaattggggacatgttacaaggtcacaggagccagcttaaagaggccaaacttgggacaattttaacatctaaaaaattacagtaataaactataaacctttaaaaaatttcacaaatccctacaaataacattgaaatgatgcttgagaagtggggggctcttgttgactgcaagtttatgccaggtgctgactgctaaatgggaaggaggtaaagttagaaaagtcatcattttgtaactgtcatggtaaggaccagataaggcaagatcatcagcaggtgcttaatctacaggaaaatacttgtgttacccgatgattacaaatggggaaaaaagcagtaattatatagtggggaaactgcataacatcgtgactgggtaatcaaagttaacaccacctttgagggacagatgacttcacgtgcctccagatgtgattccctcaaaagtgcacactctacctacatagtgttcctgctgcatggatcatctgaatctaattttgtggaatcattaggaatgttctattaaaaataagggaagaggtgatagcgttcttcaaaaatgttactgtcataaaagagaaagaaatgctgtggaaatgttctaaattaaagaaggctaaagagacagaacaactatactagactctagatcctgttctggagggagaaaaatatgctttaaagaataaaattaggctggtcgtggtgactcatgcctgtaatcccagcactttgggaggctgaggcaggtggatcacctgaggccaggagtttgagaccagtgtggccaacatggtgaaacctcatctctaataaaaatataaaaattagctgggcatggtggtagttgcctgtaatctcagctacaggtggctgaggcacgagaatcacttgaatctgggaggcagaggattcagtgagctgaggttgcaccactgcactccagcctgggcaacagagtgagactctgtctcaaaagaaaaaatatatatataaaattggctttatggataaaatcacagcataaatgatagataagataaaaacattatatctgtcctgagaacaggtaagagaatattcctctttttataaaacagactgtgcagtaaaggaaagagttagttttgtttaaagagagatctggattttgcctttggcttctggagaaggtaatcgctaagtccctggaatatactgcccgattagagtgtctttcgtttacccagaagccttgggccacacaccagatagttaaacaatgtgatttatagtaggggctttgagccatgtggtattagcttaacctctggagaaactggaatctaagagcagccacccaggtggtcaatcatatctaggtaactaagctccagtaaaaactctggacaccaaggctcaaatgagcctctctggctggcaatgctccttacgtattgtcatacttcactgctgggaagtcagtgctgtccacaactccacggaagatgacaagtggaagctgacatctggaacgctcctggactctgcctcctgggcctcttccctaggctgactttaatctgattcctttccctgtaatgaatcattaactgtgaagacaactgctttcagtgagttctgtgagtccttctagtgaattattgagcctgagtgtggggctcagtactcttgggtcttggggactcctaatcttgcaattggtatcagaggtgagagtgaacttggggactcctgaactctgtatatacactgaagtatttagagaaaaacggccatggtatattaacttaccctcaagtcgttcagaaaaagatattatgactatatatattttttcatatacatacataagtatgtatggagagggaaagaacatgaacataaatgatagagcaaatagggtaaaatgttattagaggtgaatccaggtagaatcttggcgaatctatatgggtgttcttgtccttttgtaagttttctgtgagtttaaagttatttacaaatataatgtttttttaaaaaaacccctctaaaaagtcaagttcatcaacagttactggtgccctgaaaaataaacttactaacctggaacaacttactaaactgtttgatggcaaatcaatgaagcaggaccatatttactattccaaggatagactggacaaaaccatcagaaacatcttgtctgtgttgcacggggattattaggactctcgggcacctaatctcagagaataatttcaggggcttcagagtttctaacaattgagcacacaaagacaccccaggaggctgccattgagtaactaagggcacctatcctcacctactaagagcaggttcctgaagttctccagcatcacatctcggtacagcttcctctggacagagtccagcagccccagctcctcctcagtgaagaccacagcaacatccttgaatgtcaccatctcctacaatgccaaacacatgcacactaagtttacagaagaagggcagtgctgagaaggtgtaaaggactggaagctgttctggagtctgggcaacttgagtcacatttacatagttctcttctgtttaccttctgtaatgctaataccattcaccaaaagggctgcaagaaaagaaatccttgcactttgaaattacttccttttgttagcacttataagtaagcctctggaactctgttgcaccctaggttaccaatattttaaattgtaataataatgtcatttgctccacaaaagctttagttctaacagtgactgatgctacctgtttctcctcatttacacacacacacatcacttatttaatttgtcaaatttacagggtatcagtcatccttactgctcaaatatgtagctcatcctctgtgctcatctggagactgctgcagtgatgggcacagctctggagcctgactgcctgtgtctggatctgggcgctctgcccaatgctagctctatgatcttggacaagtttcctatcttctcatttgtatggtgaaacttataccatacagtcctagtaataaaatgagtgaccacatgtaaagcatggaaaacagcacctggcacacagtaagtacccaacaaatgttagctacattattaatattttcattatatcttctatcccatttctgggctgcaaagtaattcagagaactaatggtctagaatataataatttgatccaactaatgcacacttagtttgaggttacctatacgaacaatgttgcaaaaacaatcttttgcattgacgttaacctctggaattctgttgattatctcctcaaaataaataccaaaaagtaacaatggcaatgctgaagaataatgacctttaaagttctgaaatcataatggcaggtgttttcccaaaacagactttcgccttccatcttagccttcttccaagaaagtataaatcatagtcaacactggatatgaaagctttttaaaaaaatctttcataatctcacaagtaaatttgggaagtaaaaatcatttattaaaaacattctcacaaacttattggtaataaagttcattctctttacacacatttgctgttcatctcgatttcttgttttgtaataataattcatttggaggacaccgaggtcttttcttccatggacattgtaaatatttttcattccactttgctgtcttgtaactttttgctgtagggtaattttaaatttttaaatgaacaactgttcagtcccatatttcttctggctgcagttctgagcataacagcttcagctctgaatgcagaactctgctttggtttgctttgcttttttgtaagtctttccacgcaagtgatatgcctgaaactcttggcccagaaagcaaaggctttagagttggcccaatgcttatcttcctgtatgaacatgaacctcttaacagtgcaaacgactctacagttcccctccaacagtcatctggggccatgaatagtgtgacagatgcaaagtgcctatatatcctatggtatgactaaaaactttaaactaagtacctgtattactctaataaaattaatacatgaataatgaaacacacacagacatacaaacatatatagataaacacatagctataggtactgagaagaatctagctcttcttatataagaatctagctcttcttgtacaaaaacatctatttttcccccaaccttagcttcaatataatcttgttagacaaaatcatattttatgtattccacctgagacatcacttaggagaaaatatttttagttttgagtctctagaacattatggacaaataatatcaaaattctctcacactggtttttgagtcaagattatttgtaggaaaactgatactgcaatgtaaaactgcaagaatcctcag[138 bp omitted]tggtgaaaccccatctctactaaaaatacaaaaaaatagctcggtgtggtggcaggcacctgtaatcccagctactcgggaggctgaggcagagaattgctggaatccaggaggtggagggtgcagtgagccgagatcatgccactgcattccagcctgggcaacagagcgagactccatctcaaaaaaaaaaaagaaaaagaaaaagaaaagggggagagggataacaacagtttacgtcaataatattagatgataaaaattaactgctaaaaattaagcggataaaaattcaaaattgttatgtattaatgcaagaacagttatatttaaaaaaatgaccatggacaaaaacagatttgtaagcagggtaataaggtgtaggattttaaaatttctattcttctttgtactattatttatgaaataaataataaaacacatttacaactaaaaggaaattttagaaaaggacaaaaacaaaaagcaagagcctgatacataaatgatactaaatgcctgttgtcattctttacccttggcaaagaagggggaaaaagatatgtccactcactgcaaaatgaggtcacatgtaaaacggcataaatgaaaaccagctcacctggaatttggtcatttttctctttctttttctagagaaaggcagagacctgagaaggcagaacagggtaatacgaaagaagccatgattaaaagggaaacgtatctttgtgcaaattagaaaaaggtgtcccttcccccagcagatgtggccacacaccggcgttaaggagcaggtagcatgggttggattctagctaccacttggctctcctggcagggtgcccgcatgcacggagcaacctgcacagctgtacccagtagcctcacatgccttacagctcccagcatgctcattctgattctgggagaggtgggaaaggagaggtagtggcatgtcatgtactggttaaaagtggactctggggacaaaatgtctacgttcaaaacctggtgctaccatatacttgctgagtaaccatggttaaattcatgaacctttctaatgtttcagttctgtcatctgcaaaatccagaccacacagtgccaacaatatatgattgttattaggattatctgtgtgcatagaggaaacctattataactataccagggatctctacttccttgcaactatagagatgcagataccattctgtatcacaaaattgccctggcgaatgtattttgtaagacatctggacagcagagattactgctctgtcccgggaaagtcacccgtaacttcggaatgtctgtagctctggcttcttacttttgttgccacagtatatactatatacatcgagaccacccttatgaaaaatgcagtggctagtaaatattcttcctgagctcaggggaagttcagtggtacatccctcttcccacagggtacaacaaaagactaatgaaacctgtgagactactacatttctcatgttaaacaaaaatgtgatcctctgtctagatatgacaaaatctcattggtgatgagaacacctagcctgcagggttgtttgtggggctgcgtgtgctcctctgtgaaaagcagctcagtgcttgaccctggggaggactggacaccaggagtttaatttcatggttcttcctcaaggtttgttactttactttacttactgttctcaggcaacattaaggctatctgtggaagagaaagaactgaaaaaaataaaaaaggaactgaaaatgaactgtgggtaaggcagagccttctagcaccacctcaaagagaggtgcactactccagtaggcacctgctccctcctgccccacctggcctctgctgtagaatccacaggatgtaagcacaactaccaagaacaagtatgaacttggctgcgtaatcagcagtaaaagagctgagttttctttcactcatccaatatttatggattgccttctaaaagggatacagtgcccagatagatgccagggtagagggtgcacggagtcctttgagagagcatggaagggccctcaaatccatacatgatgatggaggatggatgaggatggagaaaatgagggctgatcttaatgttggaaggtgactgacctatatttgccactcaaagagaaaggagtcatcagactattgaaacagaatgagagttagtgggtatctagggcaagagagaaggcagaaaatgtaagaagaccaactcacatgctttagaggaactccctcacttaatcccacaaccacccaagaagttgggacaatttgtaactctttttacagttgagaatactgaggcattaatattttaagctgctttgtcattttagctagcagaatggccaggactattagtccagggtctgtgttctcagttactaggacagtggctcttaagctgccagctcaccggtatcaatggggagctttaaaaaaaaccaatgcccagacccaagtccaggctctataaatgaggatctgtggaagaagagtttttatgaaatcccccaggtgactacagtgtgcagagaggattgcaaaccacagaccaggacatacatagagacagtttgcaggataagcccatgcaattaaccactaggccatttggcctctcaagaaaattgtcagagaacactcaagccaggaacagagaagggcctgggagccaggcctcttgattcccagatccccatttctctcttttaaatgatgttcttggagctgtcactaagaggaaggagcagtaacatgcgctgtgggtgtctgcagtcacgcactccgtgtgaggacagccttccagtttagacctctctgatcacctttatcaagcagggggtcactaatcagccaagggactttgagaattcaaaagaaaagggaatttctgttaaatatgaaatcacacagtggtcatcctatagactattgttgcttcttcatgtttgatagaattaaagcctgattatgttcctttcttggttaaaacaagtgcatagctgcctttgggataaagtctagattcttagcaagccacacaggaatctttcatgtctgtctgctcattttctctgcaaatcttctctcccctttgatctccagccgtgtcaatcacttgatctcataaaagagtctccaggcccttgcatgtgccacccctcctgcactcctttctcttttcacttagagcaggggttggaaagctttcataaaaaggacagatagtgagtatttcaggctttgtgggtcacatgctgtctctgtccaatattgttctttcttttcacaacccttcaaatgtaaaaatcattcttagctgaagaagagacacacaaaaacaagccacaggcaatttgcccactcccatcacagatcctcttagcttttaacactgagcttgtatgtgccccgctctgtgatacctttaagaaggtttcgctgaagcctcattagctcctaaaacccattttgccagcctaatgaaagcggaatgctttggccaagagcccaggctacagaatcaagctgccaagcttcaatcctgactctaccacttactggcagcataaactgacacacattaattaacctctcaatgcctctgttcttcatctgtaaaatggagataaacgttgggttgttatgttatgttatgtgagttcaatgcatcataatattagaaagtcagtgtgagtggtaataaaatctgatcaatgttagccattgttactaccatcttcattatcatcactatgaaataaatctagaagctgctcattagctctggtttgttgcaaagtatgtttattttaggtcagtaattaaccatataggtgtacatcaccctttcaacattctgaaaaatctattggcttcagcatcccaccaaaactgatcagagataagggacagggaatattcacatcttttattctcccacatctattttcagaaaatttgaatatactctcactgagttgaaggtccccattcctgctgcctgctggaaagctgcaccaaccacagagagttaccaaataattcctctctgccaatccctacgtttggtaataagcaaatggagaatttgacacagttcccgctgcacagaaatctgtagccaaatgggaaagacagatcagaaataagcagcagaagcatctgcgagctcaaagacaggtcaacagaaacaatcaaacctgaagcacatgaaaacaatgtgcattctgttgttgatagagtgctctacaaatgtcaacgaggtcaagatgttaatagtattattcaggtcttttgaatccttactggttttcagtcttcttgttctactgattactgataaaagagtgttgagatttctacatagaactgtgggtttctctatttttttcttttaattatatcagtttttcttcatgtaactgttgttttgtaggtacacttttaggattgttatgtctactcggggaactgacccttggcatggtgtccctcggcatccctggccttggtctgaagtctactttgatattaatatagccactccgtagtacagctccttttcactttttcactttcaaactatttatgtccttgtatttaaatggagttattttagaccacatatacttggttcttgctttttatccaatcttacaatatattttaattgatgtattcaggccattagcatttcctataattattgatatagctgggtttctgtctaccattttattatcttttttcctgtttgtcctccctgattttgtccctctattacccctttttctgccttcttttgggttgatttttttttttttttttttttactattccattcattgtatctattagcttttggctatatgtcctttttttttttttccagtggttgctctagggttgtaatatacatatctaatctttcacagtgtatttagcattactgttttactactttttgtaaaatgcagatgccttaccaacaaatagtttcctttatctccccactttgtttcatttgtatatactactctatatacacaaaaacctctagccaagaaagttataatttttatttaaacagtcatgcatattttaaagagtagaaaaccagtattttatatttgccaaaaaacttactatttctggtgctctttcatcatttctgaagttcctagtttccatttaatatcatttctattcagcctaaagaacttcctttagtgctccttttagcacagatgtggcattttttcatttcattcctgaaggacattttcactggatatagaattttgtactgacaactcctttaagaatattaaagatgtttttccaatgttttctggcctccatggcttcccatgagaaatccacgtatatctgaatcattgttctaccagatatataatatgtcattttctctagctgtattcaagaatttttgtttatttttaattttcagaagtttgattatgatgtatccagaagtgattttctctgagtttatcgtatttggtattcaacgagtttctggaatctgtaaatttatgtctctcaccaaatttgggcaattttcagctagtacttccaaacaaacacttctctcctctcctcctgagactccaaagacaggaatattagacttctgatattgtcccacaggttccgaaggctctgctcatttatttttcaattttttttctctctgttgctcaaattgcatttttatactaacctatcttcaagttcactgattcttttttctgtcatctccagtctgctactgagcccatcgaataatttttttttacttcagatgttatctttttcataaaacaaatcttaatttcctaagaattcaaatcaaagtattttctctaactataacagatttaaagtagaaatgaacaagaaaaaatatctggacaatctccaaatgtttggaaattaagcagcatacttctaagcaaccaatgaaattagtcacaaaagaaattagatgcagtgaagtggaaatgcttcttagaaaataaattagagcatattttaaatggaatcaagacttaaatgcaacatatcaaaatgtaagagatgcagctaaagcagatattatagggaaatgtatagcaatgatgcatatattagaaaagaggtcttaaaggcaaacagaaaaaaaggacgtagtaaacctaagacagaaatcaatgaaattaaaaacacaaaaacactagacaaaatcaagcctatcaaaatatggctgggccaaatccagcccactgcttgtttctgtacaggatgtaagctaagaacggcttttactttttaatggttgaaaaaaatcctgaaaagattattttgtgatgtgacaattacatgaaactcaaatttcagtgtccataaagttttactgtaacacagccatgctcatttgtttacgtacggcctatggctgcttttgcattacagcagcagtgctatgtagttataacagagttcataggtggcactctcatttcttcatattgttgctaagcacaatttaaaccactgtgactcagcattaggttaactcaattgggttaaatgctgttaattgaacagcatttcaagtaacatatgtattgctgtaccacaacattttaatttttgtattactaatacacactcttcaagccaaacacaagaaaaaaaaacagaaaaacagactttgttacactttgaaggcacaatggaggtgaaatattttgtgaatgaattagatggcaaagcttatcatgcttattgtgcttcctatgcagtgacaacgtatctatgctaaactaatcaaacctatgtcaacactgtcacgctaagcactcatcacaatattctcaattcacaataaatggtccgaaaaattagaaaattttaaataaaatgtctcatcagagcagaatttcttcacaaaaaaaataatgaaaatgaggtagcaactacagtacattttgatattcagatattcagcttctatttctgccccaagcaaggaaagtaatttaccagtgatgaattaattaaatcatgtttgattgcagaaggcaaagaaatgtatccagataaaataaatttgtttatgattagtagactttgggcaagaccaactgctctaagagttgaggacaatgggaacaacattatggtccattaaaatacaagggaaatgattctgataaatttatttggctcttgatttcacagatgttactaatgttgctcagatattgtgtattcaaggaatcaatgccaagtttgagtggttgaatggttagcctctaggaacagtcgatatggaacaaccacaggtgaaaatattaccaaagaaggtacaaatactaattcagtaaacctgaggcagtacaatctgctaagaagtgttaaaattgatagtggtaaaagatatgttggagcagaaaaaggcagaggttggatttataaaaacatgtatttaaagcctatggttactcattgtattcttcatcagcaggtactttgcagagaatattttaatctatcatgtgctattgaaccactagtggcaacagtgaacttcattcaaactcaaagatttaaccatcatcagttgcatgaatttcatgagaaacagaaaaattctgacttgccctaccacatgagagttcaatgtctgagcagcaatgaagttttattgtgattttttttaaatctcagggctgagactgaaatatttctgaataagaacttccctcaagcattactattgatataatactgaatgacattggaaattagctttagctgcagacttgataatgcttcttaatgaactcgacctaaaattaaaaggcaaaacagtacttatttgtgaagcttatagtgtaggaaagttatttcaaagacagttaatgtctgaatcacaggtaatgctaagccactttacaaatttccagtgctgtcaaaagttaaaacaagtaatatctcaattcccacacaaatttgtagtatatatgttatctgagcccaaacttcagaattgtagcagtgttttcagaccttgatgcaagcgcaaaggacctttctgcatttcaaagtccatttcattgtacactgcataattctcctaaccttccattgaaagtgattattctgaaatgtagtgacatactaaaaggtaaatatcaagagtctacagtaattctttaaatgtcttctgtattagtttctattgctgctataataaattaccacaaacttggtggcttaaaataatgcaatttattctttattagttatggagatcagaagtctaaaatcagtttccttgggttaaagtcaaggtgtcagcagggctggttgcttctcataggaatccatttccttgccttttctaacttctagaggctgctggaattccttggcttatggctgcagcactccaatttctgcttctgttatcatgtcactttcttctaattttgatccttctgcttttctcttataagaatccttgtaattacactgggcccaaccagataatccaggataatctacacatcttaaactccctaagtttaatcacaccagtaaatatctcataccatgtgaagtaacattcataagctctgggaattaggatatggacatctttagggagccactattcagtttaccacatctttcaactcattgatattcacaattaaaatcatttgcttatggattagtatcagtatttcataggacctatttgtttaaaaaatttcttttcaaagataaaatacataaaatctcattacaaatcagcattaacagatgaacatttacagtcaattttgatgacaaggaatagcaaccttgaacttcaattaagttgtactcaatcattatatcttaaattttgtcaattaaagtttcctctcattatataaatacctaaataatagtactgatatttctagttaactggaaaaactaaaatatttacaatctgggcctaaaaaaataggtttgctggctcctggacaaaattaattcaacccacaggcggttctttgcaaagattagtaaaaattaaactcctgatgaagaacaaaagagaaaagacacaaattaccaaaatcaagaatgaaagaagggatatcactacggacttaacaggcattagaaatataaatgaattaacattaatgaattcaaagtgatagatgaaatggtttaattccttcaaagacacaaaacacaaaatactgatgtgagaaatcaaagagaaaaatgaaaaaaatcactcaaaattctacatactgcattgatttgttcacgtgatgttatggaaaaggcaatggggttggggagtgaaccaggggtttcctggggttaagagttggggaagagtttgactacaaaaaggtaccacaaggggatgtttctgggcgatggaactgttgtgaatcttgattgtggtggtgaagtctacatgacaatgcaattgtcaaaactcagaaatgtacaccaaaaagaataaatttctactataagtagataagttaaaaaataaatgttaaaaaattaaataaggctgttctacaggtacttgtcaaacttttaagtgcacagcaatcaccagctccagtaaaagtgaagcagaaaaagcatttgacaaaatacaacatccactcatgacagaacttttgcagactaaaaatataatggaacttataaaaatgctttcccctatgatcaggaacaaggcagagatgtgtactcttgacataactattcaacactgtactgaaaatcagccagtgtagtgaggcaaggaaaagaaataaaaagcatacagattagaaaggaagaaataaaactgaccctattaatacacaacatgtgtctctgtggaaaatcccaaggaatctaccaaaaaacaaaaatttctagtgagtatagcaaagtcagagaatacaaggtcaatgcacaaaaatcaggtgtatttctatacactaacaatgtacaactggaaaccaaaattttaaaacaatatgatttaaaatagctctagaagaataaattatatattatactcgggcatatgtctaaacaaaacatgtatagatctgtatgcagaaaatcatgaaacactaatgcaagaaattaaagaacacttaaatgaagggacatgttatatcaatgaactggaaaactcaatgtgataaagacggatctactgattttacataatgtcaatgaaaataccagctgaatttttggtagatataaataagctgattctaaaatgcatatggaaaggcaaaggaaccagaatagctaaaagcaattttggaaaaaaagaataaatttggaagaatcaaactatccagtcttaagatttactatcaagctacagtaaatatgatatcttggtactggtgaagagatacacacatagatcaatttagcagaacatggtacagaaataaacccaaacaagtggtgttgggatggttggtcattcatatgtaaagaaataaaacccaacttaaccatcacatattataaaaaaagttaaaatggatcacagatttaagtgtaaaaccataaaacttctagaacaagagaaaatcttcacgacctggggctaggcagacttcttagatatgacatcaaaagcacaatccaaaaaagataacattgataaattagatgtaattaaaattagaaattttgttctgcaaaagacactattaagagaatgaaaagacaagctacaggctgagaaggaatatttgcaaatcacacatccaacaaaggacttatatccagaatatataaatagctctcaaaaatcaacaataggaaaaatataacccaatgtaaaactgggcaaagcatgcatacagacacttccgcaaagaagatataaggatggcaaagaaacaataacaaaaaaagaaatatctgctgaacaccattagccattagggaaatgtaaattaaagtcacaatgcttagaatggctaaaataaaaaaaaataaggaaaatactaagtgctgatgaagatgtaaataaactggaactttctacatcattagtgagaatgcaaaatggtacagatactacagtttggcatcttataaagttaaacatacattccccatatgatccagtaaccacactcctggcttcgtaccctacagaaataagcacaaaaaaaactgtacatgaatgtttatatcagctctattcataaatgccaaaaagtggaggaaaaagtctatcaaccagagaatagataaactgtgatacatccataaagtggacacttctgttaaccagaagtaaacagaaatgaagtattgatacgtataacaactttgatgaatgtcaagagcaatttgctgagtaaaagaatccggtctcaaatgttaacatatagcatcagttcatttatacgacattctcaaaaagacaaaactatagcgttttagtggttatggtagttgccagtggttacaggtatggtgaggggtaattatgagggaagacatgaggggagtttttggggtgatggaactgttctttttctgactacggtagtcgttatacaaactatgcctgtgttgtaatagaattgtataccaaaaataacaaaatagtcaatgtcactgtaaaaacattttttaaaaacctgttttaaaaacctggaaacacaacctcagttataaggcatggtctataaatgttgttaccatttctaacaatttgtttcttaggaatttttttagattatcaaaacataaccaatcattgctcttcaactcttcaatactctgaaatagttggtggattatataacctaccaatattaagtgagattaaggaatatatccaggggttatttctattctattttgatacctaattccaattccacactgcaaatccttgatgccagctgtctgttgagtagctactctaaccataaacccttaacaaccttgtacgatgtgctgggcacatggagaaaagtatgacatggtcccagaaatagaagaactttcagtgtatggatttagataaagagaaataagaaacaaagagctataagacttaggcaaggcaaactctatactggaacacaaaattcatcaccatccttctccaaggtacaattctcttgcatcccctagcttcctcaagtaaggaccattctgtaagcttcaacgaatgaaaaccttagagtagctgctggcatttccctttcaaagtcttggatataagcaatttatgatcatcaacgtttggcaattatgacaatcaatcaaacgatattatactaagtcgatgttagagatttgctttaaaatactgaaacaaaaaaaaaagggacagggagttgatacaagactggcaaatgttaacaaaggttgaagctgggtgacgcttccacagaattattttagtcatattacatttggctatgcttacaaatttccatagtaaaaacttaagggaaaaataaaagctatgaagcctatttggttaaacatgggtgaaaatccaaaaagaagtctactggaagaggaaaacattgaaatattaatattgttactgttatatcttgtggttagcataatttttttcttttacactttctatactttcttaatcttttacaatatgcaataatttatataatcagaatatgaactataaatatttcaaataaaattaaattacagataattttaaaaaatcaaaaattcaaagcttattaaccttgctttcacggtcctctagtaaaatccaaatatgtgttctgaagctgatactaaacacatcaagaactaaggcaatggatggaaactatttgaattcaaatcccagctcaggctcttaccacctgggtgacctaaagataaaccacctatgctctatgtctgtttgcttatctttaaaatgggaatggtggtacccaacccaggctcaaagggctcttgtgaggattaaagatgttaattcatatcaaactcttagaatgatcagcactaaatgtttaaatactatctttattactcatgcccaagtactccctcatccgtttctgcatttattgaacaaatatcagcgcatcttcgagcagaatttgccagtgaatgatggaaatatcgtcttccctgaaaagaaaggatgataagtactactcaggtgagactccgctgccaagtgccaaagggtcattccctccttctccctgcagcctttttcaagaagtcaaggctaaagaaggaaaggaggatgggggaaatcagaactcctgcatgaattacaatggactacccagacagccaggagtgatcctgtcctaaagaaaaatctctcagtgatcagaaaagggccagggatactctgcagctggagctctgaccccatcctgggttcacagaagctttcagggaactgagtccttctcagaaaattaaaaagtgctaataacaagagacccatcttctaccacctgtcaggctctgttccaagtctttttatttaactctcaaaagaactccattagatagatactagtaccattttaaagaaaaagaaacataggcagagagattaagatactcgcctgttattatactgctaggaagtggcagagctggttgatggtcaggggaaagggctggggaagtacagaacccaggagatccccagtccctgcgatgtaggatcttggacccccggcgctaagtggggatgcgccagctgccccacactggagaaggctcattcaaagataacacaaatcccgcccttcgccgcaagtggattatcctcccctagagctactgcccggttgctactggaccccaacaaaacgaacatcagtatggacggaaggagcaggaagcagggcggggagcgctcacctttctgggaggaacgaaggccgcggcctagcgtacctggggcggaagtggctctgcctaccgagacctcctggactacgcttcccagaattcccgacgggatcagggagacggcctcagcctcctagagcggaagttacccgactacacggggctcccaaactacatttcccagaattcctagaaaaactctccacttatctgcctgcctaggacgcaagtaccgggtgccaagctgagagcctggatgatatttcacatgtgccggtcccaaaggaattccttaactcccccttcctggaaccgaaatgcttccaaagacagagagctcgtatatatatttctctgttttacccagcggaccgtgcatgaaaggcgcctttcctggcgcgtgtgtctctgaccctgtggatcttctggacaattcccggaatttcttgcagggtagcactttcccttaagtcgtctctttctcgtttggatagtcagtatttgtatagtcactattctcttttggttagccatccaattttatactgctagtccagttctactgccttccccctagagtttgaatttatttttcttcaaacgcgacacaaacccaaataaactcaaccaaagcggactttacctacctacctacctacttaccaagaaaatatcccataaaggagagaacagagaagcttgcaatacaggaagaaaaaagaaaagaattacagaatggaagcgatgtgtgcgctaaaaatgcaggtacttaaaggaaattgggctgatttgtactggacaccgaatttaaggaatacaggatctcaacctttctttgactcgattacctttttattccattttggtgtggacgcgtctgaaactgatagtgctgctgctacctaccataatgtgtttgttgcaagatccacaagaacgtggatgccaagaatccacaaaaaaacagatgcaaccgttgatgaggccataagcagaaacagtaaatggttcccacgtttcctctgctttaactactgatgatgaaatgcaagtcataaggcaaatagaagggctgtactgatacagacaaaatgttattattatgggaagggataagtctcttgtaaaacctcgaaatttttttcttctttgagaaaaatctatcacctattttcaccctgctcttgatatagcaaatattgtaagttgtcttatggaggacaggatgattcagggaggacggtgaatgggttgactcaatccagaaaaggaagaggaaaataaaaagacataacgaccaatctgtgaaaatgctcacggggtcaggagatcgagaccatcctggctaacatggtgaaaccccgtctctacaaaaaatacaaaaaattagccgggcgtggtggcgggcacctgtagtcccagctactcgggaggctgaggcaggagaatggcgtgaacccgggaggcggagcttgcagtgagccgagatcgcaccactgcactccagcctgggcaacagagcgagactccgtctcaaaagaaaaaaaaaaagacactattaagagatgagactatttgattctttatttaacaactcctttccaaggaaatgtttctgaaaatacatacggtttacatattaaagaggatcaatctgataataggggatttttttttataaaatgaaaggaaattttaaaaataaaagggacagaataatactttgtgtacttccacttccagtaataataaaatgagtgatttggaacaaacatctggcagaggaaagatgagcaaactttttaaatgtcaaaaggcatcaaaagacaagataatggagaaatggtgggccaaaattcagaaacacttgggagagtcatgcatttggggctacttttctcctggggatgatggtctagtttaggatctgaaaagcctagaagctctgcagcacttttgacacctatatgaagctgggggaacaaaagattctagcaaaaactaaaattcgcatcttttcaagtgcacataagatttgcacaaattagcaaaatgatacgggatttcaaaatactgaaatactaaatatgcttttgaatacaatgaaatttggctagaaatcaataaaaatacaactaaatgattcatgtgtgcatttaataaatattgtctcatctccaaacccaccattcttcactctgctttatggggctggaatgggggaatctgcagccaatctttcccgacctccacacccccaatctggttctgtgttgggcaattattagcagaagcgtataggggtggtgggggcagggagatatactatatcctgtgcctgccaaccagcagtactttttcttgtagcaactgcctaattttcagtttttctaacacttgaataacctatttcatcatggctctttgtaaacattattaaacaacttcccaaagactgatccttagatgtctaagtcctaacactgcagggccctgcttttgagctcagagacagcagaaccagcccaacattgacctctcctcagaggtctgagtttcaggtgagcatgaccttccttcaagcttctaagttttagtaattctggtctcttcactttgtttcctcagacctcaggtggttgctgcttgctgcagttgctatttcctgcagttgctgcttccatcatatattagagttcttttttttttttttttttttttttttttttgagagtctcgctctgttccccgggctgaagtgcagtggtgccatctcggttcactgcaacctctgcctctcggcttcaagcaattctcctgccccagcctcccgagtagctgggattacaggcatgcgccaccacgcccagctaatttttgtattatcagtagagatggggtttcaccacattggccaggctggtgttgaactcctgacctcgtgatccacccgcctcagcctcccaaagtgctggcattacaggcgtgagccactgcatgtggcctacagttctttttctgctctttcagaaatctagctaccaactctacaatatgctaatttttcttttcaaataattgataaggtttctatcttctcagtggaccctaaattacaaacttgtttagaaattaatcaaaccacttttaagtaatccatagataaaagactgtggcattgaaatttggtgtcatcagtgaattctaccaaatatttaaagaagaaaccatgttcatctcaaaattattcctgagaataacaaaataggaaacactttccaactaactttatgaggccactgtaataacactgacaaaatttgtgagaggcttcattagaatggaaaatgacaggtctggccaggcacggtggctcatgcctgtaatcccagcactttgtggggctaaggcaagcagatcatgagatcaggagatccagaccattctggctaacacagtgaaaccccgtttctactaaaaatacaaaaaaaaagccgggcatggtggcacgtgcctgtattcccagttatttgggaggctgaggtgggagaatcgcttgaacctgggagatggagattgcagtgagctgagatcgtgccactgcactccagcctgggtgacagaggagactccatctcaagaaaaaaaaaaagaaaagaaaaaagaaagaaaaagaaaatgacaggtctatctcgtcataaatatactttcaaaaatgctaaacaaaatgttgccaatgatatataaaagggcaacctaggtatcagagaaaaaaaaagtttgattaatcacccatttatcataagaaaatttaggcaactaagcaatagtaaagatctacaaaaatggcaacaaatatcaaaaggaatagtgaaatattgaaaacatttcctctatgatggggaacaaaataatgatgtccaccccaatcatttctactaaataccacatttgctcctttatcctgcaatcttgccaactaatctaattaattttaatattttatgtgtagatcttttgaattttatatgcatgctcatgttgacttcagatctgcaacaaatggggcgctgcagcaacatgggaacagggaaaatattcaatacatgttgctgttaaattgagtattgtgaaataaaactgaaattgacctatacctcccactatatgcaacaatctaaggctggtggattgtagagcccgatttgaaaagcatttcttatgacacttaaatctactcagtgtataaacctataagaaatgtgtaccaaaatacacatataagaatgttcatagcaggatcattcatcacaatgacatgctgagaatactccagatgtctatcgatgatagtatggataaatatttttgttatttacacaaggtaaaagcaaggacattgaacaaactttagctgtacatgcaataccatgatgactcccataaatatgttgagcaaaataactagacaaacccagtagatgcagtgtgattccacttgtacgaagttcattagacatgcaaaattcatcaataggatgattttggacacttaaatagtaaaaatatgaagaaaagcaagggaatcttaaaacttagggtagtggtttctttttatggggaagaaagcatcatgatgctgtgagagtggggtgtttgcaattctaccatgcttcaatttttgttgtgggtggtgattatacagctgttcattttatattcatactttcacatgtatatttatgattcagacacttttctgaatgtgagtgatatttcaatctgtaaaatcaatgatatatgaccaacaaactgtggtgcatcaatacaatagagtattattcagccataaaaagaaatgagatatgaagttatgaaaacacatggaataaccttaaattcatattgttaatggaaagcagccagtctgtcaaagctacgtactgtaattcaactatatgataatctggaaaaggcaaaactaaaggtcagtaaagtgatcagtggttgttagaggttcagggagattaattgatagagcacagggtatttttaagcagtgacactattctgtgtgatacagtatggttgatataggacattatgctttgtcaaaacccatggaatgtacaacacaaagagtaagccctaatgtaaaccacagactttaataataatgtatcaaaattggttcattagttgtaataaatatgccacacacatgcaagatgcaaacaataggagaaactgggcaggggaaaggagagtatatgggaaatattaatactttctcagtttttctgagcagttttctgtaaccctaaaactgctcttaaaataaagtctattttaaaaaatcaatgatatgtttcaaaggaaactgaatatatggcatagaactttttcagaacttagagggaagggctaaaaataatgagaaactctataatgaatatgaacatactgatcaggtgtatcttataagctaatgagaaaaaatgaggattagagaaggaagcagattgtaataaataaatcattaagaaagaataaacaatttatccacatgggcaaaatctcatattggaaggaggagaagaagatggaggagaagggggaggaaggtgagggtatgtaggaggaggagaagtaggaggaggaagagtaagagaaaaaggaggaagagactcgtagagatgcacttgcagacattgagaaattttttaatggcaaggctgaagactaaagaattgagtcaatttcaaaggaatgaaaaaataagctttgcattttaattattgtctgcaacattaaaagtactaataaaatataaaaataatctatgggatttttgaggtgaaaagattgatccttctatggtcagagaatgttttgttcatgtgcactattcttggcatacaagattcagttgtgaatcacttctaaattctttccggaaaatattcttcaagacatattacaggcctttgacaacaacacagataaagcgtccacagaccgtcttcctagtttatttacatagaaatgctggataaaatgtgaatgtgaaaatatcatttatttgaataggagaatgtttgagggcacacatattaaaaagaaaaagaaaaaaagaaacagatattatttatttgttccattatatcccccactacccactctcattttctcccctgccgcatcagtaaccaggtcgatctgtttaatgtgtgcctgttgttggtatgtctttctggcaaaatgtgtggaatttcggatgcatatatatatatcttgtgttataaaactctgttaaaaattttcactcaaaactgtttttctcaatattttactaaaaaaaattttttttgaagacagggtcttaccttgtcacctaggctagagtgcagtggtatgatcacagttcactgcagccttgaccaactgggctcaagccatcttcccacctcagcctccaaagtagctgggactatagttgtgcccaatcacacatggctaatttttttttttttttgcaaagatggggtcccactatgttgcccaggctggtctcaaactcctggcctcaagtgatcctcccaccttggcctcctaaagtgctggcattgtaggcatgagccactgtgcctagccctgaaattttataacataaagaagagttggaagaattatacagtagtcacccatatattctcagcttagatactaaaattagcaacatttatgtcttagccatctatctagctatcttattacttatccatcagaacattaacattaccccacaaattccctcatgacactttccagtcagtctctaaccccttcccccagtggcaaccactgttctactttttcaccataaattttactaattttagaatatgaaatatatggaaccatacggtaagaactcttctgtattacaattctttgagtatagtgtttttcagatccatccatgttgatgcacatattagtcatttgatcctgaagtgatgttctattgtatgaatataagtctttggaaacttgcttacattttaattgtttaaatatttttatgaataaagatcctgcagcatacttataaaagtctttttgcgtgcatgtgctttcttttctctggaataaatatctatgattagaattgcttgatgtgtttaactgcttaagaaaccaccagatcatctcccaaaagattaattttacactgtctcccaaaatatatgcaatttctgattgttttgaatcctaataagcatttgctgttattagtatttttttttgagatggagtttcactcttgtcatgcaggctggagtgcggtggcatgatcttggctcactgcaacctctgcctcctgggttcaagcgatcctcctgcctcagcctcctgagtagctgggattacaggcacctgccaccatgcctggctaatttttgtatttttagtagagacagggtttctccatgttggccaggctggtctcgaacttctgaccttggatgatctgcccacctcggcctcccaaagtactggaattacaggtgtgagccaccatgcctggcctgttatcagtatttttaatatctgccattctggtgatcttgtagttgtatctctctgcagttttcatttgctttttcctgatgacaaataatgtcacacttctccatgggctatattaacaatttgtatgtcttcctttgtaaagtaactgttcaaattttgcccattataattgagatgttgggctctttaatattgtattgtacaagtctttatatattctgggtgtcagtcagtctgaaatttgggcagagtttaatgtagaataaggggcaattctttgcttgacatctttttccctggatttcttccctcactttccaggtcctgtggtcacctcaatctctgtcatctagatcttcaagccagtggatactacagaagcatccacagattcaatgaaacagggatcaaaaatattcagaaaaaaaaatacaaattagcaacacaacaataaaaataacacaaataaaaaacccaatacagtataacaactatttacatggcatttttattgtatagggatggaaataatttgaattatacagggtgatatgaaaaggttagatgagactactatggccattttacataacagacttgaacatccgcggattttgatttccataagggtccctgaaccaattccccacggacaccaagggactactgtattcaggattttttcacctagtgcatgaaggatattcatctgtagttttctttccttataatttctttgtcttgtttggtattatcagattaatgctggcctcatgagacaagctgggggtgggtgggtgttcccttcccttttcgtttctgggtttatttaaaattcacatctttactctttaaatgtttagtagaatccaccaatgaattaatctcaatattggtttttttattgttgttgttggaaggctttatctattaatcagttttgaaatatatatcaggccaggcaggtgcagtgtctcaagcctgtaatcccagcactttgggaggccaaggtgggtagagcacttgagcccaggagttcaagaccagcccaggcaacttggtaaaaaaccacctctacaaaagatacaaaaaattagctgctcactgtggtgtgaacctctagttccagctactcaggaggctgaggtgaggtgggaggatcaactgaacctgggagttcgaggctgcagtgagctgtgatcatgcctctgcactccagcctgtgtgacacagcaagaccctctctcaaaaaaaattatatatatatatatttatgtgtgtgtgtgtaaaaattgtatacacacacacacatacatacactcaactatctaggttatcctagatatttctttttgagtgaactttggtagtttgtgcctttcaagtaatattccatgtcatgtaaattgatgaatttatggacaaagagttgtttgtaatgttcctttataatccttttaatatctgcaaaatctgtaataatgttccctccctcctgatttttgttttcttctttttccccgttggtgagtcagttgaaaggtttataaactatattgatcttctcaaagaataaggttatgattttgttgatttttaaagattgtttttctgtttccaatttcattgacttatgtagctgccacaaaacttcactctatcctctccaggacccagctgggctcaagaattaaattaacataacacagattaacaggagaaaagcatgcaaatttatttaatacaagttttacacgtgaccagagccttcattacaaaatgaagctccaaagaaacagtcagttatgtatacactgtagtgaacaaagaatagtaagttgttaagaagcaattaggccaggcctggtggctctcgcttgtaaccccagcactttgggagacagaggcaggaggatagcttgtagccaggagtttgagaccatcctgggcaacacagtaagactgcatctctacaaaataaaaataaatttaaatttttttcttttttaaaaaagaagcaactaaatcatgcggagaggcttgaaagatgttattttaaggtggtctgtacagaattcttttgggcttgacttctcattttgaggaaaagtatattgctccttttttttccagtataaggaggggatcttctttcctccttcccaccctccctccttccttcctacctcttcccacagacgtgctagcagaatgtgctaattagtaaatatcttctgccctgagaagagagatgacacggcaagaagaaggatgctaagtcacactcagttaaggttctgctgctaggagccaaagagtcattctttcctcattcctgtgaccatctgcgagaaatcagaactgtgtctccctcctgcacgaatcacagaggacatcccgatacaatagcctggagtgattcccgccccattccccccacccccacttttttaaaaagggaatccaggaatcgtcctgcttcctgtagggatcagaaagaaggggcaaaatagcactgcaggtggaactctgatttcttcccaggctcatagaagctttcaggtaactggggcttctcgggaaattaaaaaaaaaaaattaataaaatgaaccacacttaccaccttttacttgtgactatctcatttaattctccactcaactgcatcagtttggtactactattccccttatgttacataaaaggaatgctaggcacatacagtttgaattacttcccaatttcacacccctagaaggtggcagaactgcctggtcagtcctggagtaggaacagagcgcacaaaatacaagagatcctcaacccgccaagaccaaatgctgcaaactcgacaaaggctcactcacctggggcccaaccccatcttccactgctagccgcggatgctcttctcgaagacaaggagggccgccgccaggctaaacgaaacattgctgtctcaggcctcactcaacttcctgaaaggaatgatgacctcactttcatggagcggaagtgactgtagttacccacaattcctggattataaccccagaattcccaatgagataatcgtcacagccacgccctcctgtagcggaagcccggccgcctacacagagctccaaggttactgctcccagaatcctcgcaaagaattggcaatgtcgttgcctttctctggcggaaggctggctactaccctttgaatttggaatgtatgtcacacagttctagagtagaatgcaaactcagcactgtcctctttgaaccaaaatgtctccaaaaacaagattctaatttatacttaatatttcccccagaagcccaatcattaaagccacctttccaggaacagaagtgtttttgacactgtgaatgctttggaccagtttccagaatcctcttcaggtagtgcttctcaccagcgtttccctttttattttggataactaggttcagtccgaatcattctatctcactggtcaagctcagccttcttcttccttattctcattttttttctttcacatgtgacaaaacaaatgcatttgaacgcccctcccaccctgtctcccacccaaatccctttagtagagaacacagtttgaaatgaaaaggaggcatagattataaaggggaagatatgtgtaagcaaaaaatgcagaacttagaaactgggcacgaatgtaaggaatacaagatctcaaacctactttgactggattttctactttattccatgtgttttggatgcatctagaactcttggcagtgttatctgatatatgctattcattccatgatacaagaaccacaagaaggtcatgcaaagtttattaaagtataaagcagaagcagcaaaagcttttgggtgttccttgactttaattgctcattgtaaaacgtggctcatgaggcgaatgaaaggaggtgtgttcatgtgaaggaattattataatatgaaaagagataaatatataaaaatttgaaatatctttttgttcaagttcaagcatcacatcacccacttccaccctattcttattatcataaatacaatgataactgaagaatatgaaaaccagtgagaccatatttcgttcaagtgagtcgattgagagttggacgcaaatccagaaaacccaacaaataaaaatacacgaaggttctgcttaccacttttcttctggacaagaactaaacattttcatacctttatgttatgaaaaatttcaaacattgatagaaataaagagtgaagtattccattgcctcatcacccagattcagcaattttcaacatgtgccacacttcctttatctatcaatattgtctttctgccctttttgttattgtaattttaaaacaaaatcatgacactgtattatttccccctaaacactcccatgcatacttcaaagaattacattttctaatataacaaaaatacaactgtcacactgaagaaagttaataattccttaatattattttatgccctaaaaaacaaaacttcagaatttccagtcatctcaaaaatgtccatcctttgcatgtgatcgttttgtctcttgagtctctttcaatctggaagagtatcccccctttgatccactttaaattcatgcttttggcatatacaagacatcaggtcagttgtcaagtaagatgtcccacattctggatttttaaaaatgtttcattatgctgtcagttaacattttcttgaatatcttctgtggctctggtaaactacaatttagatttagaaagcagatgagattaagtttcatcgttttcggcaagaatacttctccataggtaggtttattttggccttgttcagtagcatcaccttctccttagtgcagatcacagcacattcttgaatattactgtttcctacagcacctaagatactacacctcaatcatgcacaaatgtccattagaagaagaacaaggttaaaagagtttgagggaaagggtgaagactttaggaatcaaaattttttctctttcaattgctaatctcatcctattaagcatccatagtcttgcaaagtgtgaaagaaaaataaatctcgggacccccaaatcaccaagccagagggaaaagtcaagctgggaactgtgtcaggcaaacctcccatttgattacttaataagatagctgtaaagcagaaaaagctacatacctccttcacaatttgtccacaggggcctgtttgtgggcctgaacatctttatccaaaagcatttctgttgaatttcaccctggtaatgtaaattgatagcttatcttcacaggtgtgggataaaggacagacagaactcaaagtcattcctctgttcacctgaaacaaatgcatatctgattgcttcctcttccctattgtttatgtagtaatgcagattcactaagcaacattaagacctaagtcactattcgtctacccacctctcacttgtgagttttgtattcagtaaaaggctaatcagagcctcaaaataatgccactgtttgtctcttatctacctatgatatagaagctcccactcccattcgagattgtcctgcctttctggacttaagcaatgtataacttacacatactgtttgatgcctgatttctccctaaaatgtataaaatcaagctgtgccctgaccactttgggcacatgttgtcaggacctcctaaggctgtgtcacaggtgtgtacttaaccttggcaaactaaatgttctaaattcattgagacctgtctcacatacttttgggttcacaaaagtatgctttagtgaacacccatgtccatttgttcttgatctttaaatgagtgttaccataatataaattccttgaatggagacccttgaatctaagagtatgcacagtgcatagagtcatattaccaaacctatcccaaaacaagtgatctgattgactgagccaatagtatttgagagcattttccccccaaaatagatgccatgaattgaaatatcccctttcatggcatgtttaaaatacttctaccattgcacataccgacttatcaaagttatctggtctctgatctctgtacctctaaagcaatgcttcccagccaaggtcacatacactgagaaagtgtctcacaaataacttttaagtgataactgataccaaatcttatgttatttaaaaacaaaaacagaggcaagtcaatattcctcacataatagcatcactggtgcctgaactgaagttcactctctagagtaggagaccaaaagatgattttaaagctgctgggccaggtaatatacttaacctgtagcctttgggacatatgctattgactggctcacagagcatccattcataatccctttgaccctgcatgtctcttctataaaattatgggggaaaatcaaaatactttcttaatgttccttaagtctatggttgtcatgggacaatattttgaaacaattagatgtaagtgtcagtcttctgtttatactagaaagaagagaaaagatttggttggtattgaggatatgagatgaacaagggatattgaaaatgcagtaggatcaatgaattgtagaaattgatgaagtcaatatgacagtaaaccataggaagatctggcaagagaatatgtagagcagactgtaatgccttaaatggagactatggagggattgcagctattgctaatttaaggcctatagtatgaccatggaaatgaataccccaagtaggatagacaaaaaagacgaccagaggcatggaagtcagtatatatctcttaaattgtaaaacatttcatatatacataaaactatgagaataatttttaaacacatcccagatgcccaggtttaacaagtgcaaattcactcaatagaatacaacacaatcattaaagatgaacgttatgaagaacgtgggaaacagcaaaattaacttatggtatattactaactgaaatactaatttaaaatttacacattatttaataaaaagcacatctctacataagtataaaataaaccaaaatgaaaatgttacatgagggtggtgctagtaggattataggtaagtcctaacttagttctgaacttacttgtaatgaggtcctgccacttaaaaaaaaaaaaaaagttccagacacttttaaaaagccatatttattgaagtgcaatgtacatacattataaaggctactatttttaagtgtatagttcaatgagttttaacaaatatgtacagacatgtaactaccaacacaatcaagttgcagaatatttccaacgcttcaaaaacttcccaaggaagcggcaatgctgattggtgggtccaacagaagggctacgggagtacaggacccaagaaaccatcaaacccaatgatgcaagaccctgcctcattccccagcctgggactcgggaacctcccgtaacactggaaagctctactgagtcgagggaaacgcaaacatttccaaccctaatcctccaccggctgccacttttcctcctcaagacagagggccttgaccatctttggtccctcacccaggctgaggaggcgcagaagggtctctaaggctcaagtcttgcatgcagcatgatggccgcaactttccctggagcggaagttcctgcgactcacttcccagagtcaggagtcacaccagagggccacaccctgtagtcccgaagaggaagtgttgtcgactatatgaaacgtctgacccacacttcccagaatgtttaagcggaacgacgacaaggactccaccagcctgggcgaaaatacttccgactacagttcccagaatacccagcacgctagtgcttccaccttcctacagctcattctgttagttaagtgcgttcaaactgaaggtcacttctgtggcgcgattagtgcttggactttttatttttgtaatttttttttcctcaagaaaaaacgagtatgtggaaatataaagaaagtatgactatttggggataaaagcaaaggctttagtatgaaaagaaacacgctttagcggaaaagtgatgagtatgagaaaaaacaagattctaaaagggagttgggctgtccactggacagaaccttaaggaatatggaatctccagacgtggtttaactccgttgcctctttatatgtgcctgtagtcatctagacctctgcttatgctatctggcatggacaatttatttcaagatgacaagaatccacaaggaattccaaggacaaatcagtcttgaaatcaagcacagaaagagcaagttgtatctgaaaaatgaaggaagctgtactggcaggaaatttagaaaatatgatatggaaaatggctcctttcttgaaattttttgagttcaaatcaggcttggaattggctattcctctgttgcccgttgacctcatatatttaacatgaacgtatcttttctacaaatcagtttaagccatgtgaatttatggttattcaggaagaggtgggtaggttgagatgggagacggactccagataactataacaagtcaaactacaggaagtatgtacttaccactttccttctgggcaggaaaaaaaatttttaatgaaactttcgatattaacacaaaaaggcggagcttgcagtgagctgagatcacgccactgcactccagcctgggcgacagaggagactccgtctcaaaaaaaataatagtaataaataaaaaaaaaagaaaaaaggaaatgataacatgaaacaccaaatgcacctaccctaaattcaacacttcccaacattttgccacacaggcaatatctatgactattgaattttgttactgaaatattttaaagcagatccctggccttatcccttcccaatactatctgtatcacttaaaaataatgatgttttaacataaccacaaaaccgttaccttatgagataaaattaacaaatcttagtattatctaatatgcatgccaatttgaatctgttttttggggggaaaatgcttttacagctggtttattccagtcattatccgaacattttgatccattgtatttgattgttatctcaccagaaagtcatttactctaaaactatgcccccaccccgaccctcccacacacagcaccaccaccaccattttttatttccttgaactgttggggaaataaaaatgtcaaattaggtgtctaaattctggatttgtctaaagccttccctatattttctcctctgctcttttaaatgttctgtaaagtagaaatttgatgtaaagtctagattaaatgcaagttattggtttttgcaatacttcatagaagggactggaaatatttgaaacagaaaccatattctcttcaactaaagtcaattcaaatcctcagcaagtttccctctgaagagaaagacaaaaataaataacagcaaatatgcaaaaagagacagattaaaatatggaaaccatcataacaaatcagattctagacttgagtacaatggctcatacctgtaatctccagcactttgggaggctgaggtgggaggactgcttgagtcaaggagtttgagaccagcctgggcaatattgtaagaccttgtctctgcaaaaaatccattaaggtaagctaggtatttgagaccacttttatctcaaaaaaagtttgaggtggaatttgccaattccttatggtaaaaacctgagaagctgatagttggagtctaggac[137 bp omitted]agtgaaaccctgtctctactaaaaatacaaaaattagccgggtgtggtggcgcacacctgtagtcccagctactcaggaggctgaggcaggagaatcacttcaacccgggaagcagagg[134 bp omitted]agctgaatgggaagtaggcccaacctggcagttattcaaacccaaatccaagtcaactcaatccctgaccctgtattgcttgtaaatctggcaaaaataaataaaatcctctgtagagatcctaagcatccaattattttttaaactttttattttaaaataatcacagatttatatgaaattgcaaagatagtagaaagaggtcccatgtacccttcacccagtttcacccagtgattatactgtccttaattaaaatacaacattgaaaccagggaattatattgacaccatgaatatgtgtagttgtatgttatcacttgtagattgatatagctactaccacaatcaagataaataagtattccatcactgcaaagccctccttcttgctacatcttgatagtcacacccagtcccctcccttccaccattcctgatatctggaagcaactaatctgctttccatttctataatttggtaatttcaagaatgttatacaactagaaccataaaatagattcacgtttttcacttagcataattatcttaagacccatctaagttgtgtatcaatagtccattcctttttattgctgagtagtattccacggtatggatgtaccacagtttgtttaacatttacctattaaggaacattttagttgtttccactttttttccattatgaataaagctactatgaacattcatgtacaggtttgtgtgcatttgtttgtgtatgtaagttttcatttctctggagaatatgtccaggagtgaagttatggggttgtaaggtaaggataggtttaattttttaaggaactgccaaactgttttctggagtggctctactactttacattcccaacagaaatttatgagacttcgagtctctttacatccttgccagaatttgacattgttgctattttttattttagctgttctaatagatgtgtagtgatatttcattgtggtcttgatttatatttccctaatgactaatgatgttgattatctttgcatgtgcttctttgtcatatgtatatctttttcattgaagtgtttgtttaaatcttttagcttaaaaaattggattgttttcttattgagttttgagagttctttatatgttctctatacaagacttttgcatatacatgatttgcaaatagtctatcactccctagctggtcttttcatatctgtgtaagagttatgattttatttttcgaaaattatttttttaacagttttgggggtcccacagagatgccaaatagattcatgtaacgaatccaggtaatgtttgtcaccagaaaattacacctcagtgatggtcttaagcccagttgcattgtttcttggctcccagaggtaaatacaaagtgacaatagaaatttgttgatcctctgtttttcgcattttaattttcttctaattttgtgtttcatttttgttttgttttgtgttcacttatagctgataaattttcaccatcactggcaacaataattgggaattttttatgatcttgtttttaaagtgactatcagtgctgctcccaaggttctcaagtttttaagaaactgtccttgtcaaaaggcttatagtcttagacaaatttatatggacacatttcttcagctgctgcaaaatatgattcaactaactcatcatcagtaaataacttttcttgcttgactaacagattagccactctaaaacttactttggttatagcctcattttcattcgctgttttttaaaagtaattcggctttgataagatattccattttggccataattatctgtgatttggaaatattgggaaaagtttctaatctggcagtattaatgttattatttttcttcttgtacagctatctgtcactgcaaaacaaacacaatagtcagccgtctgattctataacaaaataatctacactttactataccttaaaagcataacattcaaaatttgattttctcttcttgttttgacatgatggatatgcaaaataaatgaaatatcaagtagagtgatacatatggcactcaaaaatctgttaacttgtaataactgtgttactgaggtttatgatacactgagtagcagtatgaagtgatgagaacattatatatggtctctatcataagtactcaactgtaccaatataacatgaaaacagccatagacaatatgtaaacaaataagcatgactgtgtttcaaccaaaatttatgaatgctgaaatttgaattttacatacttatcatatgtcataaaatattcttcttttgatttttttgactatttaaaaatgtaggctgggtgcggtggctcacacctgtaatcccagcactttgggaggccaaggagggcagaatgcttgagctcaggagtttgagaccagcctgggcaacatggtaaaaccccatctccacaaaaatgcaaaaattagctggacatggtggtgcatgcttatagtcccagctactcaggaagttaaggtaagaggattctttgatcccaggaggctgatgctgcagtgagccaagataatgccactgcactccagcctgggcgatggagtgagaccctgtctcaataaaaaatgtaaaagccattattacttcatggggcatacaaaaacagtcaatacaccatatttagccattaggccagaatttcccagcaactggcttactctgtcttacccagaaccagaattccaaattgatctataaagtcaacacaatatcaatcaaatttacagcaggctttttgcagaaactaatattaagatttacgttgaaatgcaaaaaacaactaactaaaaaaactagaatagtcaaaattgttttgaaaaggaagaacatcattagaggaataacagtatcagattttaaaacttactctaaagctccagtagtcaagacatagtaatggcttaacaatatttatataaatcaatggaacagggtgattccagaaaatagagccaagtatatatgatcagtttattttcagtgcagccacaaagataattcaatgggggaaagttgtttaaaaaaatagcactagaacaactagacatctatttgaaaattatgaacctcaacacttacctcacatcatacacaaaaagaactcaaaataggtaacagacctaaatgaaaacctaaaactacaaatgttatacaagaaaacataggagaaaattttcaaaaccttgggataggcaaaaaaaagatttcataggtaggccaaaaagagcacaaaatctaatttaaaaagataaaccagaacttcatcaaattaacttactctcttaaagacattattaacaaaatgaagaggcaagccaagactaggaaaaaatattcataatgtatctatctgagaaaggattggtatctaggctatattaagaaatcttacaactcatcattttttatggctgcatagtattccatggtgtatatgtgccacattttcttaatccagtttatcattgttggacatttgggttggttccaagtctttgctattgtgaatagtgctgcaataaacatacgtgtgcatgtgtctttatagcagcatgatttataatccattgggtatatacccagtagccataaaaaatgatgagttcatgtcctttgtagggacatggatgaagctggaaaccatcattctcagcaaaccatcgcaaggacaaaaaaccaaacaccgcatattctcactcataggtgggaattgaacaatgagaacacatggacacaggaaggggaacatcacacaccggggcctgttgtggggcggggggaggggggaggggggagggatagcattaggagatatacctaatgttaaatgatgagttactgggtgcagcacaccaacatggcacatgtatacatatgtaaccaacctgcacgttgtgcacatgtaccctaaaacttaaagtataattaaaaaaaagagaaatcttacaactcaacagtaaggaaccaaactaacaaaaaacaagcaaaactttcaaaagttcttttccaaagaagatataaaatgaccaatcagcacatgataaaatgactgataaccacctcattacttatcagggaaatgctaattaaaccacaatgagataacactacaaataatcccaatgactaaaaatcccaagtgttggttagcatgtagaacaagtgatcttgcattcactgctaatggaagtatgaagtggtatagtcatttttagaaatggtaaagttaaacatacacttagcatattcactgttacttgccttgtaccaaaagtataattcttaaag[138 bp omitted]tgatctctgctaaaaatacaaaaactagctgggcatggtggcgggtgcctgtaatcccagctactcaggaggctgaggcaggagaatcacttgaacctgggaggcggatgttgcagtgagccaagatcgtgccactgcattccagcctggtgacagaacaagactctatctcaaaaaaaaaaaaaaaatggtcagagatttcagtaataaacataaaagataggagactccaggaatggatatacctagtgtagtataaatgtgacctttaagatcagtaaataaaaaagggactcatcaataaatgttgaaagccttgactatccaattggaaaaaattaaaattagatttgtgcctgacaccatttaaaacatagtcttcatgttttgaaaataattagtgcctgggagtatgggaaagttttcttttaaaaaatcattatacaaaaatttcataaacacattgatattttaaccacataaatttttttagctaagttgcccagtctagagtgcagtggctattcacagtcacgattgtagcatccaatagcctcaaactcctgccctcaagtgatccttctgcctccccagtaactgggactacaggtatgtgacaggtatgtgccaccacacacagcccaaccacataaagattttaagtgaacaataaagtacctcattctttatgttaatagacaaggacaggcaattcttcataaagataacatacacttagcctatgacagcaattccactcctaggtatttacccaagagaaatcaaagcatatgtctgcaaaaaggctaatacaagaatattcttagtagctttatccaaaatttccaaaacctggaaacaaatgttcaccaacataagaatgagcaaactgtggtaatttcctgattactctgaacataaaaagaagactgataagcataataatataaatgaacttaaaaacattatgttaaatggtggcagcttctatagaaaacagaatggcagatcctgaaaaaattgaaaatacaattaccatatgatccagcaattccacttctgggtatgtgtccaaaagaattgaaagcaaggtcttgaagagatatttgtactcctatgttcataacagcattattcacaatagccaaaaagtggaagaaacccaagtgtacaaaggaagaaaattctgacacattcgacaacacaaataaaccttaaggacattatggtaagttaaataagccagtcacaaaaagacaaatactgggctggtcatggtggctcacgcctgtaatcccggcactctggggggtcgaggcgggcggatcacaaggtcaggagatcgagaccatcctggctaacatggtgaaaccctgtctctactaaaaatacaaaaaattagccgggcgtggcggcatgcgcctgtagtcccagctactcgggaggctgaagcaggaggatggcgtaaaccctggaggcagagcttgcagtgagccgagatctcaccactgcactccagcctgggtgacagagagagactctgtctcaaaaaaaaaaaaaaaagaaaaagaaaaagaaaaagaaaaaaaaaaggacaaatagtgtatgattccatttacgtgactcagagaagtcaaatgcatagagacacaaagtatagtggctgccagtggctgggaggaggggaaaattgagggttgctgttgaatgggatagagttgaatgggatagagttttagttttgcaagataaaatgagttttggagattggttttacaacaatgtaaatgtacttaacactactgagctatatacttaaaaatggttaagatggtaaatttcatgttatgtatatttcaccagaaaaaaattgtaaaaagccgaaagcattccaggtagctctagtttgcatctaagattaagagacatttatttccatcaaaaccaaggatctgaaaggaaccaatttacaagctcacaagttagcctgacagtctcacagatgctggcacaagacaagagactcctggctctgagacaaaggactttattagtcacaaccacagcagtagccagagtgtcatcctttgcaatggtttttaccactctaatcccatagagtgacgtgaaaggccaggtgctgcttgcatacctagcgggctgcgttgtaggaatagaactctaagcttaggaaacctgaatcttctatgataggcagtgggaacaaaaccactgcccttcaccccagagggagacactgtcttcactggagtggtccataaacaaatttgctgctccagaggaagacactatatttttgttccctaacgcgtacgcacctttgaaaagacagtggggaacaaaggtgaccagtgtctctactcaaagacatgcagaaaaagagaagtagatacttaagtaaccatagtgtctgcagaaaaataaaagaaaaaaaataagagaagcagatacagagaatgagtggggaatgaggaataataactaatgttacattctacttcaaagccagttgactacagaagaaaaaggccaattctggggttacatctcctttgtgagtggtatgctaataaatgtttaataaatggctctccagaaagaaacatacgtacattatataagtttactataaattttactaatatagaatgttttcagaacacaatttataaacaataataaaatatgcaatactctatttattataaattacaaatttagaaaaccatgttgaatgaaaaaaaagccaaacgcaagagtatattacagtatgatttcatttatataaagttcaagaataggcaaaaccaacatatggtgatagaaagcaaaacagtgattatatccttttttggaaagaaatgaagggaaaggggcacaagggaaattttggggtaaagaaaatgtttaacatgttgaatgggcattatttacaaggatatgtacatttgttaaaacttaaatgtagttaaagtctgcactttatgtaaattatacctgaaaaaaaagacaagacagatcagacatcttcggtagctgttattatgcttctatgggcagtctagtggaggcatagccactgggcccagtctgccagctgcatgctatttgtatttattgcctgtagttgtatgaagagctagtgttaagtagtgttaagtagtagttatcagtataactgataacccagcatcagttattaaaatgactattatttctccaacatatttcaaggctaataaactaactcactgtatacatgtggatctgtttttgggctcccaattcttttccattgatctattttttctctcctgagcgaataccacactgtattaattatagaaaatttataataaatgttgatctctggtaatgta[136 bp omitted]acctccacctcctgtgctcaagcgattctcctgcctcagcctcctgagtagctgggattacaggtgcctgccactatgcccagctaattttgtgtatttttagtagagacggggtttcactatgttggccaggctggtctcaaactcctgatcttgtgattcagccaccttggcctcccaaagtgctgggattaggactaagttttatagggaaaacatgtaagctaagggtctggaagagaaggcacaggaccacaatttctcataccacttgaagaagcaccagggcctgggtgaagcaggaaatagaccacacctcaccgctatgtttttatccttcttaaagagcaattgtgaaggcatccatgttggtgagggaacaaattgactatgcaggtaatctggactacttaactaaagcagacaatctggctttagttgtcagagcttcacagaagttgcatgagaaagccaggttctaacacctcccatcaggaagagaaagccgctgggaagttgagttcatgtaaagcccttcccactgaagaatgtgggagtctgaggccccagatagctcctcacctaggcatcccaaagggaactcccagaattacctttggacaattctggtcattgcacacaattgttattgtgaatgaaacattttggctacattttataaaagactcttacatagtaatgctatgaattttcacatgccaatttcgtgtgaaaccaatttgttgacccgataattttaaaacagccttcaattggtcaaattttacaggtggatttgaattttataagtaaataacattattctctagcataaaaatagtatcttccttttccttccaatgattatgtctcaacattttttattttgtcttaatctcaccccatgaatctgggccagtgttgtgacttgctttaatcattaaaatgtggtgaaagtatcattgagcctgttccctgatgaggccttaagagatcacagcttttgcccttgaaaccctggcactatgggaccaaccctcgattggtcttctggagggtgagagaccatgatgacagagagaacttcgttgtctcatctatgaccatcataaaacagccaggcccagatgaaccatcagctgactgcagatgcatgtacaaagcccagttaagataatctagcatgtcccacaccagaactgcccagctaagcccagttgaacttgccagctcacacatcatgagctaaataaatatgtatttagagctactcagttcttgtgtgtgttatgaggcagaagctgataagcatatttaggataaattatacatgagcgagtctgttacgcttttatcaaatcattggatttgacatgctcatatttatttaggatctctgcatcttcatttgtaaatgagattggctcccactgattgggagctagactaatttctgctttttccatgctactttgctacaagaggaaaagcaaacaattttgtgaagtagggagacattcctgttagcatcatatatttaaaaagcttaatgtgatatgcaagcgctgctcccggccaaactagaggattgcctgggacacctccaccaacactgagggctgattctgtcatgaaggaatgttgcacccattctaaaccccaaaagcttcctaggataatgtgtatcccggattttttctctaacttaatgtttgcaagtaggagtactggagtatgtggtggacatggacaataacatgtggacatttttataggtctagatcattgttgatggagccatgttattccattatatgggatgccctaatttactcaatctcttatacatgaaccttcaggttgtttacagtcttctcattgcaaaattcttagaacatatttctttctgaaaccatattttccccactcatgtaattacatcctaaaaatacattctgagaagcaggatcattggctcaaagacaatgcacattgtacatatgatacatatagacaagatcctctccagcaactttgtacctgtttttctttcccccaccaacttatgtaagaacactcatttcctcatttctactgacatagaatttttaaaatatttcactattatccacctgatcagtaagaaaatgacacttcagggatggttttatttgcacttgaatggctgttctgtttacaaactataactagcaggaaactgtaatgcaagaaaaactaggaataaaccatgatccaaatgaagaaacctataagtcaattaaaacaaaaaaggacactgtttttgaaggaaaaaaaaaacaccttgtgggatgagtgcagtggcccaaacctgtaatccctgcactttgggaagctgaggtaggaggatcgcttgaaaccagaagtttgagactaacctgggcaacaaagtaagaccccatctctacaagtacaatttttaaagaaaacatcagctgaacacggtggtgtatgtctgtagtcccagctactcaggaggctgaggcaggaggatcactgaagccaggagttcaaggcttcagcgagcaatgatcaggccactgcactccagccacctgggtgacacagcaagaccctgtttccaaaaaaaaaaaaaaaaaaaaaaagcaaagagatctcctctcgaattcatctattatccccaattaaatgacaaatttggggggaaactgacagaaagagcatcctttaaaaacccattattatacaggtctgctgagaagaagactgcatcagtctgcaatgaacactgttggttttttacatgttgttggtcactttagtaaatgttgattttattcaattaattttattaagactaaccacagaacacctattctagttaatttttaatcgcatttaaggtgtgagctgacaaacctattcagcatcccacattatagagtttctctattatatgagatttcttacgtcggtgggttatacttttcagtaaagttttaccacagctatatcatctggaacatttctctttggtgtactcaccaatgaatgaaggttatcactgaagaagtcccatccataccattttagatggttgcactgccacatcaagccttaaagatttaaaagttttgaactctgaattatgttacttctgtatgtggactccaatgacaatgaaacatattgctataaaatccctccatgctagtcaggatagcctaggcaatgctgcagtaataaataaaccaccaaaaatctcagtggtgagacacaatgaacttttatttcttactctaaaaagaaatccaacacagatgaagtagtgaccttctatcaacccagtctggaataagcagcctccaaggtcaccttggcagggatagagaagcctgaggatgtttgtaaaggctagacctgaaagtggcttatatcacttttgctcacactccattggctagaactcaatcacatgggcacactcttaactgcaagggttactgggaaatagacttcttatttgcaaggaaatggaaccagtgtgataaacacagcactgcctctgccacacccttcaaatgccacttctatggagcttcttgcctgtgtagagaatctcatggaaaacctgggtactaacgttctttcatagtaagagcatgggtttcatttttgagcacacttttgaatgttcttcatacagagagtatttttctactggggactaaaaaaaaatctaaagacgttggctgaactgaagaccttaccatgatcatcccaattagaatttccttcctggacacaccctttaatggaaatttgaccactaactacaaccactaccacaaaccacccatttgtcaaaagtaacctctttgccattgtagcatacagcagttgatgggagcttcacagaagttcttgaaatccacagtccttgcctggcacacttcagtgctgcaggctgacattatcgatggcagtgtccctgtcttttgctcccctagccctcccacaggctgagtaagcctctatcatctggaatacagtgtggcttctgttttactaattgaaccctgacttactacatttataatgtttctctctgctcatgtagtctttgatgagtcagaaggtcctttccacgctcacagtgtgtgtactgtgtctcatctatatgcactctctgatgggcaaggaggtatgaattacgactgaagcccttaccacatgccttacacttatagggcctctctcctgtgtggactctgaggtgaacattaagatctgaattccggctgaagcctttaccacactcatcacatttatatggtttctctctgatgtgatctctttgatgtaagtgaaaatatgaactgtaactgaagcactttccacacacttcacatttatatggtttttctccagtgtgaactctctgatgagtgtgaagaacagagctatacgcaaaatcctttccacacacattgcatttgtatggtttctcccctgtgtggactctctggtgaatgtgaaggtgtgtacattggctgaagccctttccacactcaccacacctatatggtttctcccctgtgtgaaacctccagtggacttgaagaacggagcttgaactaaagcacttgccacactcactgcatttgtagggcttctctccagtgtggactctctgatggacaagaaggttggagctctgatcaaagcccttcccacactcttcacatttatagggctttttccctgtgtgtactccctgatgaatacaaagaagtgacctaaatccaaaccctttcccacattcatcgcatttgtagggcatctcccctgtgtggactcgatgatggttgtgaagggaagagctgcgcctgaagcccttgccacattctttacatttgtagggtttgtctcctgaggagactttctgatatctgggaaggtctgagctctgtttgcagcccataggccattcgtggaattcatagggagtcttgccagagtgagttttacaatgaacgataagatcttggctctgactaaagttctttccatactggtcacatttataagatttttctcctaggtgagtgctgtgatggacatgaggatctgtatcatctgcaaaggccaccccacagttattacatgggaaaggctgtggtaatacatgggccgcattacgtttttcaaccgttgatttcatacccaagtttttcccacagctgggatgtctaccagggtcctctcctttacattcttgggactcatgatgatcacatgaggtccaactgaggctgtcatcatgctgagcacgtctgtacaatttctcttccatgtaaattcccttatatcttccctgagagttctggggctcggtcattatgttggctttcctccacgattctggggtaagaacctgtgtcaggctttgccatgctgtgatatcttgatttttgataatggcatttactacatagttttcattttcagaaatctgaagagaaatgcctgcccactcttcactgagggaaacatcttctaaatgtggggaacactcttcttgaaggttcacgatataatcctgactcacagttaaatcccggatcctttgtttccaaatctgccagcaatgaagcacttcttgcgaaaggtaacttaacccctttgcctgaagattcaaaatgttgtttttaatcccgtctcctaggagaagaaagagaatttggctaagagaacaagtcaatcatccatccagaggttttgagaaaatgtaatatgatggggtgggaagttgtccctgggttctattgacgtatgaaacaattagagccacggtaattctaacctgtgagctgccaattagaaatcaagtgttgtagggaaattaaaagaaatcttggccaggtgcagtggctcatgcctgtaacagcaacactttgagaggctgaggtgggaggatcactcaagcccaggagatcaacaccaggctgggcaatataatgagattcccatctctacaaaaaaattaaaaattggctcagttttgcctatgatcccagctacttggaaatctgaggttggaggattgcttaatcctgggaggcacaggttgcagtgagccaagattgtgccactgcattccagcctgggtgacagagcaagacctttccacccccacaccgcaaaaaggaataaaaggaaatcttaggaaaattttatgaaggaagaaattcacctccctgctataagagtagtcgataaaaagcctttaataatcttgctacaaaaggtatgggaaaggctcccattttatgtagtgtgtgtgtatataaataatacatattgatggagtgttttttatatgttgggcagagtaagggacacaaagggtcacaagaggtttcagaaacaagcaacaagtcctatctcctgatggcttcccttccttcacatcactgtcatatggaggactatcacgtatgtttgtgtacaacctgcacaactgtacatgatgagccttaaggggatggggataaaaaggcaatggggattgaaatggggtaaacattgtgaaatatgatcctggcgttgtgcggggatgcgtatgtaaacctctgagacaagctttaagagacatcctttttattttccccaaggttctttgtcttcatgaaaagatagagaccactcagatcctacaatccatttccttaagttctgcccttttaagttgttgcagaatctcagacagccatgactatgaaaatggggaacagatactgtggcactgtcaatggcctggcacccagggaagcaagactgtggtatataacaaacagggggctgaggcagaagaggatgatcatattcttgggatcctaagatgggttccaaaatggcatgaatatcatggtcaagtcccactggatactgcttctggttcaaggtcctttctgcattgttttattgaaagtgactttagtttataagatagtatcagggaaagggagaccatgagctgccccgaatgggctttaagcagtggtttcccaattgttttgattgtaacccacagtaaaatcagcattatgactcagtaggaataggcacgaacatcaacagagactgctcactaaaacagaagttttatcagctgatacttacatacgatgtgcaatacacttcgataaattcttctgttttctgttctattaatctattttttttctttctttctttattattattatactttaagatttagggtacacgtgcacaatgtgcaggttagttacatatgtaaatatgtgccatgctggtgtgctgcacccactaacacgtcatctggcattgctagttatgacacagtaatttgatttcaggactcaccaagagggttttatcctgcagtttgagaaacaactgcagggatatgcagatttatgcaaaaggtcctgtgtctacagtttacactttggtttcaagaggttatttattaaaaacacaggacctagggccaaattaggatggctcaaatccgagttcttcttataagctgtgtgatcgtgggcaagttattaattctgtgactcagttgtttcatccattgatatggtttggctgtgtccctacacaaatctcttcttgaattgtaactcccataattcccacgtgtcgtgtcccataattcccacatgtcagagcccccacacagagtccctactagggcactgcctattggagctgtgagaagagggccactgtccttcagaccccagaatgctagattcactgacagcttcactgggtgcccagaaaagccacaaacactcaacaccagcccatgaaagcagccagaagggaggctatactctgcagagccacaggggtggagctgcccaagaccatggaaacccacctcttacatgagtgtgatcaggatgcaagacatagagtcaaaggagatcacttttgacttttaagatttgactgccctgttggatttcagacttgcatggggcctgtagcccctttgtttcggccaatttctcccatttggaacagctgtatttacacaatgcctgtacctgcactgtatctaggaagtaaataacttgtttttgattttacaggctcatagatggaagagacttggcttgtctccgatgagacaatggactgtggacttttgagttaatgctgaaatgagttaagactttgtgggactgttgggaggcatcattggctttgaaatgtaaggacatatgatttgggaggggccagtggtgggataatatggtctggctgtgtccccacccaaatctcatcttgaattgtaactcccaaaattcccatgtgtcatgagaggaacctggtagggggtgactgaattatgggggcgggtctttcctgtgttttctcatgatagtgaatgagtctcatgagatctgatggttttaaaaaggggagtttccagctgggcacggtggcttgcacctgtaatcccagcactttgggaggctgaggcgggtggatcacgaggtcaagagattgaggccatcttggccgacatggtgaaatcccatctctactaataatacaaagattagctgggtgtggtggtgcatgtctgtagtcccagcaacttgggaggctgaggcaggagaattgcttgaacttgggaggtggaggttgcagtgagccaagatagcaccactgcactccagcctggctacagagccagactccatctcaaaaaaaaaaaaaaaagatttccctgcacaagctctcttctcttgtctgccaccatgtgagacatggctttcaccttccaccatgattgtgaggcctccccaggcacgtggaactgtaagtccagtacacgtctatcttttgtaaattgcccagtcttggatatgtctttatcagcagtgtgaaaacagagtaatacatccataaaagggggataataacagtaactatctgtattagtccattctcacgttgctaatgaagacatacccaagactgggtaatttataaaggaaagaggtttaattgactcatagttccatgtggctggggaggcctcacaatcatggcagaaggtgaaggaagagcaaagggacatcctacatggtggcaggcaaggagaaagcctgtgcaggagaacacccatttataaaaccatcagatctcatgagatttattcactctcatgagaacagcatgagaaagacccctgccccatgattcagttacctcctaccaggcccctcccacaacatatgggaattataggagctacaattcaagacgagacttgggtaggaacatagccaaaccaaatctgtatctcataaactaaacttaggtaacatataactgtatatgaacctctgagaaatgaaaaggagtttagatatttatcaaaaagtaatcatataagccaacacttagattacacttactacataccagtaagtgttggctattgtaactgccaaccaaaccaaagttctcccttggttcctttaacaccggtttatccaaaacattggataaacattggtttttttctccagaagcaaccaatagatcaaggcccttggtaatgtgtgaattttatcagtctcattctgagaaatatgaggaatgagagcctaaatgtgtgagtaggggagggagggcttacttcctgcactgaatgcccacaggccaggggtatgagatttggggagagctccctcacaaacccatcacaaggggccagatctgtaaaagctcattaactgtaggtttctaacctgcacatgcatctcttaggagttttctttccagtggccaaagtttctctttgtggtctaactggaatattctatctggtttgaaatgatgatttgaggaaacaggtccagtggtctcatgctcagttactcactcactaacatgaggttcctgaagttttccagcatcacatcttggtacaggtttatctgggctttatccaatagtgccagctcttccttggtgaagacaacagccacatccttgaatgtcaccctttcctaaaacatcaaccacatgccacgtcaatcatccacacaaatgactggtcttagtctgtttgggctgccttaataaaacaccacagtctgattagattaaacaaaataaacttatttcttcctgtcctggaggttggaaagtctaagatcaagtaccaccaagataggtttcattcaggtttcttctcttggcttgcagacagctctgctctcactgtgtccttacatggcagagggagaatgagagcaagctctgttgaggctctcataaggacactaatcctattggatcagggattcccaaaggacagtattaatcaaattataaaatatggcccaggaaataggcacagataaatctatactaaggtgttgtgctgatacacaagtctagtagcatttcatgagttcatttctcatcacacaccaagatttagtattttcactttttcatggcagattaatctatttgtattatgttaaaaggaactaagaagacagggtaactaaaagcattggctcctagattcaaaaaacacaaaagagaaatgggagattattaggataattaagaacacttggatatcaactaggtattaaaaaatagtggtatcaatgtgaaatttcttgagtatgttagcagtaatgtggaaatgtaggaaaatgctcttattcttaggagatacaaactgaaatatttagggatgaattatagtaatgcctgcaatttatccccaactgggtcaatcaaataaaatatagacatgtgtgtgtatatatgtatattatacatatgtttgtgggtgattgttaacaattggtgaatctaggtgaagattacacattatgctattctttcgttttcctgataaattgaaatttctcaaaataaaaggatgcgggtaatcatctggtattaataaccatctcctcatgtgtcttttggcagcacaaatgtcttctttcgagaagtgtctgttcatatccttcacccactttttgatggggttgtttttttcttgtaaatttgtttgagttcattatagattctggatattagccctttgtcagatgagtagattgcaaacattttctcccattctgtaggttgcctgttcactctgatggtagtttcttttgctgtgcagaagctctttagtttaattagatcccatttgtcaattttggcttttgttgcatcatcactggccatcagagaaatgcaaatcaaaaccacaatgagataccatctcacaccagttagaatggcgatcattaaaaagtcaggaaacaacaggtgctggagaggatgtggagaaacagggacacttttacactgctggtgggactgtaaactagttcaaccattgtggaagtcagtgtggcgattcctcagggatctagaactagaaataccatttgacccagccatcccattactgggtatatacccaaaggattataaatcatgctgctataaatacacatgcacacgtatgtttattgcggcactattcacaatagcaaagacttggaaccaagccaaatgtccaacaacgatagactggattaagaaaatgtggcatatatacaccatggaatactatgcagccataaaaaaatgatgagttcatgtcctttgtagggacatagatgaaactggaaaccatcattctcagcaaactatcgcaaggataaaaaaccaaacaccacatgttctcactcataggtgggaattgaacaatgagaatacatggacacaggaaggggaacatcacacaccagggactgttgtggggtggggggagtggggagggatagcattatgagatatacctaatgttaaatgatgagttaatgggtgcagcacaccaacatggcacatgtatacatatgtaactaacctgcaggttgtgcacatgtaccctaaaacttaaagtataataaaaaaaaaagaagtactgaaataacctattgggtattatgctgattacctgggtgacaaaattttacaccaaacccccgcaacacataatttacccacgtaacaaacctgcacatgtatcccttgaatctaaaataaaagttggaaagaagaaaagaaaattttaaaaaattaaaaaaaccatctcctcatcaagaaaccaatttttacataaaatatttctatggctgcatatatcgcactgctcagagttaagtatttacagatatgttctctcaatagactctgcatctctaaataaagcagaggtttcaaacaaaagttgtaagcagttacaaaggacttcacaagaacatgttactaacaattgtccaattaccaaaatctgacaatgattaaaaacaaaatctaggggagtcagcacggttgtcctaatagcaccactctctcagtaacactactgtatgccttcttctgtgggaggcaacaaaattgaattggagataatcattcaggaaatacagatacactgaagcttacttggggtgttccaatgtaggaagaaggagttaggaatagaggttcacacagcctactcctcattctcccttctctgcctcagctatagagcctgggaaaacaaaacactcatttctccaccacccttgtagctggatggatcccttgtgggaatcctaggcagcgattgtcataggatgcagatacaaggacagccccaaaatattaagaaaccaaatttataaatgaataaacacatgcaaaaatctttaaatcttttcctctatgaagtattcttgtataaccatctatgaagtatgaatctattcaagcatctggtgcttccacttacaagaaatactgtggatagagtaacacactgaaagacaccaaaaggaagcaaacaaatgcattccaaatgtaggaaagaacacaggacaccaaacttggtttctgcaacaagtcaatagcaggagagaataaagtagaggggcagatttctctagattaaaagacattatgagatacaacaactaactgtatgatagtatagaccttgttaagatcccatttgaacaaaccaactgttaaaaaattttttgagataatcagggaaatttgattattgtctgggtattagataataccaaataattattgattatttcattagtccatttttaaggaaatatatactgaaatacacagagagtgtggtaagttagactgctgtttagaaatatcctcttccatgctctccaatcccactaaaggaccagagtgtgtttccttacccctttagttttgacttggcagtgtaacttattctggctaccaaaatgaagcagaagtgataatgtgccagttctaaacctgggccttgacagatctcacatgtccacttgctctcttgtccctctgtcttcactatgaggacacaaccaagctaaccaaaacgagcagagtgctaccaaatatccatggcattggctttaggtccaggccataaccattgaggacactgttacaggaggctggaaaaatggtgacctgggtgatgcagtggtgaacatttggtgaactgttgctgtaatttagaagatagaaaatgtacctaatgaatcttggacttgggcaagatggtttccaggcagcaggataaaagtgtgaactcattcattttagttgcatatataataaggtactatacaaaagtgatatgctcagagaaaaaccaataccatgtgaaataccatgcctctttcaaatactttgggaaagaaaaaaactgaaaaagagattaagcaattctctttggcaaaaagttaattgttgaaactgcatgatgggtactgcaaatggaggatcataataccatttgctctttttgtgtattttcataattaatttttttcatgattaaaagaaaatccttcctccacactgtgatggtctttctaatgtgtcaacttggctaagctacagtcctcagttattgaatcaaacactaatctaggtattgctatgaagataatttgtagatgtgattaaagtccataatcagttgactttaagggagattattctaactaatctgagtatgtctgattcaataaactgaaaggtcttatgagcagagctgaggcttccctgggagggggagaaattccacccacagacagtagcttcagtctgtgtccaagagttccagcccacccttcctgaggggctgccctgtggattctggacttgcctagttagcccccataatcatataagtcaattccttatgataaatctcttaatatatatctcttactggttctgccttgctgactgaactctgaccaatacatacccattcaaatcttgctacttattgaatgaggccagtcacatttagagtatggtcacgtatatgctgcccatgcactcggatgctgcggcaacaccaaatttctgtaagtttctgaacttactcttgattctttttccctcatcgggcagtgataagcagttcatggactggtactgatacatgaactacacttagagtagcaccaaagtagacatcttgaaatctgtgagtttgtttcttcacttctataaagggagtcaaaccacctgcctcacaaagtcattatgagcagataaagtacctaatacatagtagtcactcaaaaaatgctgacctcctttcagaaaacagaagtgtctggttcctcagaatgaacagcatatttaaagagaaagaaacccttaacttacctggaacttaatcataccgtcttccttttggaaagggcaggattctggaaaagcagaactgcaaagaagaaataatccatgagatcatgggttcaacaagttgtgaatgaacattggttccttccttatctgtacaagtttctcacaatttctcctctcactggatatcatctcttctcgctctgaacagactgaactcccacctcctcaagacttccctagatttgtccccagtccctcaatctcagaccactgtgtaactcctatctctctcctgaagcttttgggtcaaaacctgcacattcttttccttttctgagacttgtgaatgaactgacataatctacatctcaattatgctggaaaagaggctacagaattgctgaataagggagcaatctcagggctgggcacagtggctcacacctgtaatcccagcactttgggaacccgagacgggtggatcacttgaggccaggagttcgagaccagcctggacaacatggtgaaaccctgtctctactaaaaatacaaaattagctgggtgtggtggcggatgcctgtaatcccagctactcaggaggctgaggcaggacaatcacttgggaggcagaggctgcagtgagctgtgattgcaccactgcactccagcctgggcaacagagacagactttgtctcaaaagagaaaaaaaaaaaaaacagaggaaaaaaaaaagagagagcaatctcaggatgacagggaccttctgctatttccactttcgcatgcaagacttgatcttgtatggccaagcctgtggtctaaagaacatgccgttagccaaaatatacaaattaaatcccaatttttattattatgttaatcaataatacaaatttttaaacatctacaccttgactcttggcttcctaaactatctctccagcacccattctatcccctgcttttgcaaatattgatgacacacctatgacatataagacacattctctgttctggaaatgctcatggtatactgaactacacatgttctcagactgcaggtagaccaaagtaggtagacagaggccttctaagcttgccacttcatatacactaaagccccttcctgttctgcttatatcagtggattcccttgccagttagcttccagttgggttcagccaatggggaaagccagcaagagatccagggaagggacaagagtgaagtcagaatatttattcccccaggtttttccctagaggttgctgtggaatggctatattccatatccattgaccaaaggtcatggcctccatcaggcagctgtcatcccataaatctttcttcaggttttagcaactgcctcctcccttagcccttcagtcctaaagtcagtaagttaccctgctatcactagctctgaaatattgcagtatcctttgttgattaccacagcctgcctacaactttatagattgtccctttattaagctcttctcaaattacccaatttgagtgttctgtttattttttattgggattccatctgataaaccctgtaaacacaattgcctctggcctttgtggagaaacttattgtataaaattgccactttaagcactgtggaaacaccgaagattaaaaaacaaaagcccaaagccatgtttctgccttctcagatagtgcttctcacactatctgtgataaaggactagtttttaaattattattactgttactttcagtctgtcacagactgatattctggtaagatacagtaacaagaaattaccagaaaaaggaaatttagaaggtatgcaaattaaagcccaattgttattattatgttaatcaataagacaaaattttcaacatctacactcaagttctcaaattatctggtcacagaccaatatcatttattggcactggtctgtgggctaccctttgaattgcagctcacagggttatagaatcaggttaatagaatgtgaaatgtctttttggtaaatccttggactctttttctctcctttcctacctttaagagacatcattaatcacttcttattttgggctccaacaaaggccaaaataaggagggttcaactcattagtacagcatgaattacatcgttttacaatagttaaaacctaccaagaaaacactcctcctttcccctgtcaaaaaactacaaatcctaaaaaaaaaaaaaaataaccaagctgtagtcttttatccactgtacttggtaaggatcttatcatttaacaagcactcaatcaatgtttctcaatattaacaaatgcacaaatagaattggcttggatattatacattagatgcacgtgcaaagacataaactcaccctctacttccagtacctgttctcactgaagagccaataatgggacaggtttattttgaagcacacatccacacacatgcactcacacatatatggttgggggtttggtttcctgaatttctggcttcagacactacctgcctgtatcaagtcagggccgtggcacgaaccagacggcacattgaaatttgaggagagtttaataaacagacggcttacaatggtgttggctcggggtaaggaaatcacaatggataaggctctatcctggggagtgacagggaggtgccattataatacctgggccttaagaggtaaggggagggagcagtccctggagcctggaactaagaggactgtgtggccagggccacccaaactatgacctgttgtttagaagggcagctaatctgtgacaatcctgcagagagagaactgggggacaagatactccaactcacacttcttcctctctccaaactttcctgttgagacttcccattggccaaagacaagcaaggccagaaggcaatggcggcctttcagggcagacagcagggtggaaaaggtggggagccaaaggcatgggacacatggcacctcaagactcttgttttttccctatctgccaaagtccacacagctctcgcacacaaatgcctttctcatccctcaccctgacaactactctgatctgaggaatgcatcaggaatgagaccagatgcccatatcaacttcttcagggaatgaagacctagaggaaaagtgcagctgaatctggaactgcaattgcccagaaacacgatcagaaatgtaataaatgctgctattacacctaaaataattaacactaaatctctaactttatcaaatatacagagagtgttcaaacttcaaatttgttgagtgtaatttaacaacttatatttgctaatgtgctttataatactcaaagtccctactccctggctcacagcatgtgaggtgagaatggagtta[131 bp omitted]gcctcagcctcccgagtagctgggactacaggcgcctgccaccgtgccc[180 bp omitted]taaactctggagttattacagtattacagtctgagttgtttctttattgccaaaagccagaacctctgccttgaagtcataaatgccccaatggagtcagagctgccaaaatccagagttcagacccaagacaactccccatccaagaacctaggggtgctgagccagaatcgcccccaccaaactgagcgagaacagccgaagccatcctctatatccagagactagctgcttaagcaaatccctcatcccattcagggacgcacagtccagccattactccaaaaccctgagccagcgcccctctgccctcatccagagatgcacatcccaagactgaccctaagcttcgacccgaggaggcacagcgcaagtcgctgtcacgaaacgtgaagatgcactgttttgtcaaacccagggctgctccccaaaccgagcccacgctcgagcccacgctcttcccatcctatcccgggtaggtcgggccgctgaacttccctagtctaccccacctacgaggccttatcattggttaccagtcccctcttccactcctcctacttcagtccacagggacgggtcacagctgcacatcctacactcctactcctggctacgcctccaagaggggcgcggtacagacgggactcaccccagcgtcccaaacaatgtcgcccgcagcgtgcgtccagtaccatggcgcatgcgcaaggaggcctatggcctacaatccccagaaagccccgcgcgcagcagtggccattcgcaaggctaccctggtgaaggtggcctttgacttccgtgcatttggaagtcctttgacttccgtgcattcgtctaaaataacgacaatcataataacgataaaataatgaaatgttaaataaatcactatcaacgatgaaaagaagtttcaatattttactacttggaaatgggcactttaccgttttagtgaagacttttataagttcttattttataggcatgtcttttaacgttaaaaccacgaaacttttcaattaacactcacttaaataattccctccccgccccccaccatgttttatttctgttgatgaaaactctggataatctacacttgcgatataacatagccctgtaatttatttcctagtctcagaagaagcagaaggaattaacaactattgtctgaatccttaacaggggaattgcaggagtactgagagtgtcctaaaagagacacattacaacataacaagaaaacgcgggaagttttcagattctttttgaaaatttgcccttgttgagacttaggctttattttacttcatgttattgcatttaagatttaagatttctattaaagaaaaatttgggtaccctaaatggggtaagaaaattgaataggaattccattagaggcccacagttttagcctggaggaaagccctgataacgtgtgagaacaatctgtctcctaggaaaggtcacctggtcctgctggcagagtctctgtttggaatatctggctggcattcccttttccacgcaccctcaagctgtaggggtggtgaggcggttccagtcctagactagatagagaagtgaagacccccacctctacgcaatgggcaggaaatggttgaataatatccaactatagcttgacatcgcagcttagggcacataaagggacagtgcaattgttttggcttatctctgtcttttgatgtttacatgtttgatgttcttatatattgctctaagttgaaggattacttgatttaatttgacatacttgaattttaaaaaacgagttcaggaacatttttatttttgacctaatacaaggttaatttttgtgacatctgtgtctgttggaaaacaatgtgtcttctctatcagatggatatgcatacatttatattttccccagacttgctaactgtgctatttaaatttcctacatgcttatttgtgcttacttagattttttcattatgcatctgtcaacgattgaaaagtgcatgtcaaaaaggttcccagtctgggcgtggtggctcaagcctgtaatctcagtactttgggaggccgaggtgggcagatcacgcggtgaggagttcaagaccagcctggccaaggtggtgaaaccccatcgctactaaaaatacaaaacttagccaggcatggtggcaagcacgtgtagtcccagctacttgggaggctgaggcaagagaatcacttgaacccaggaggtggaggttgcaatgagccgagatcatgccactgcactccagcctgggcgacagagcaagactctgtcaccaaaaaaaaagaaaaaagaaaaaagtgaaagaaaaaaaagcctataatggtaaatttgtcattttcctctctatagcatttgctttatttatttatttatttatttatttatttatttcctttattttttttttgagactgagtctcgctctgttgcccaggctggagtgcagtggcgccatctcaactcactgcaagctctgcctcccaggttcacaccattctcctgcttcagcctcccgagtagctgggactacaggtgcccgccaccaggcccagctaatttttttgtatttttagtagagacagggttt[142 bp omitted]ggctttactttttaaaagttgtgttgttaggtatggaagtgttgtattccttatctgaaatacttgggaccagaagtgtttcagatattttatttttttcagattttgcaatatttgcatatacgtaatgagatatcttgaggatgagacccaagtctaaatgcaaaattcatttgtgttccatataaaccttatacatgtagcctgaaattaattttatagaattattttgaataattttgttcacaaggtttgtatacaatgtttgtgtgcattgaaccatcagaagcaaagattgccttcgtcagatgaccaaagaaaaatcaatgaaaagaacagaaagaaagcaaatacttcaggtgtggaattttccacttgtggtgtcatgttcacattccaaaagttttagattgtgaaacattttggattttaaaatttagtgatgctgaccctgtgtaagtttcataatgttcatatcttcttgatgggccaaaaatttcgttaacaattttaagtattttgtattttcaccttgagtttacttttcagtgaagactgtacctgctttcttttcattagatttcatctagtatttattctttcattttgtcttaaaattagtatatttctttaccttattatttatatactctttattattatagttatttttaaatgttacttttacctaatctaagagcttggctttagtctgaaaatccacacttaaatgggtgtgttaagaacaaaagagaaagctcttgtataattgatctaggagctgctcatacttcccaactgtagaacagtgaatctggcctgtaatcctagttgctcaagcagctgaggtgggaggatggcttgagcctggaaggttcagggtgtagtgagctatgatggtgctactgtactccagcttgggtgacagcatgagatcttatgtctgaaaaaatagaacagtgaccctcaaacaggaatgaaatagcctccctaagacttttttgaattgtgtgagtgatctttgcttgctccagtgactggggtatgtgtttagtatgcagaggtaaggaatgctaaacatattgcacttgtaaattaattctctcaacaaagaagtcatccattcaaatacccaacagtaaccccttgaaaatcactgctctaaaggaaagaaaatgaacaacaataacctcaatcaaataaaaggagggaaagaaacaatcaaatcagtaaagagaaagtcaaactgctgctgtttgctgatgatatgatcatatacctagaaaaccctaaagactccttcaaaaagcttctagaactcataaatgaattcagcaaagtttcaggatacaaaattaatgtacacaaatcatagctctgttgtacaccaaaagcaaccaagctaagaatgaaatcaagaactcaaccccttttacaacagctgcaacaaaaaatacataggaatatttctaaccaaggaggtgaaagacctctctacaaggaaaactacaaaacactgttgaaagaaaccatagatgacacaaacaaatggaaacacatcccatgtttatgaatgggtaaatcaatattgtaaaaatgaccatactgccaaaagctgtttacaaattcaatgcaagttccatcaaaataccaccatcattctttccagaactagaaaagacaattctaaaattcatatggaaccaaagaagagcccgcagagccaaagcaagactaagtaaaaagaacaagtctggaggcatcacattacctgacttcaaactatactataaggttgtagccacccaaacagcatggtactggtataaaaataggtacaaagaccaatggaacagaatagagaacccagaaataaatccaaatacttacagccaactgatatttgaaa[156 bp omitted]cactaaaaatacaaaaaattagcctggcgctgtggcgggggcctgtagtcccggctactcaggaggctgaggcaggagaatggtgtgaacctgggaggcggagcctgcagtgagccgagatcgcaccactgccctccagcctgggtgacccagcgagactctgtctcaaaaaaaaaaaacaaaaaaaacaaaacaacaacaacaacaacaaaaaccgtattcaacaaatggtgctgggataattggcaagccacatgtagaagaatgtgactggatcctcatctctcaccttatgcaaaagtcaactcaagatggatcaaaaacttaaaacttgaaaccataaaaattccagaaaataacatcagaaaaacccttcaaaacattagcttaggcaaagacttgatgaccaagaacccaaaagcaaattcaacagaaaaaatgataaataggtgggacttaatttaactaaaaattttctgcacagcaaaagaaacactgagcagaataaacagacaacccacaaaggggagaaaatcttcacaatccatacatctgaaaaaggatgaatattcagaatcttcaaggaactcaaacaaattagcaagaaaaatacaaagaatcccatcaaaaaatgggctaaggacatgaatagacaatccttaaaagaagatatacaaatagccaacaaacatatgaaaaaatgctcaacatcacgaatgatcagggaagtgcaaatcagaaacacaatgcaataccaccttacagctgcaagaatggccataataaaagatttaaaaaataatagatgttggtggggctgtggtgaaaagggaacacttttacactgctggtgggaatgtaaactagtgcaaccactatggaaaacagtgtggcaattccttaaagaactaaaagtagaactaccatttgattcaacaattccactactgggtatctacccagaggaaaagaagtcattatatgaaaaagatagttgcacacacgtttatagcaacataataagatgttttataaatataagtgatgaaatccctctattgaaagtttattagagttcatcagcattgatatcatctctcaaaattaaaaaaaaagttttcttttgttgtttgttttggtttttgtttgtttgttttgatgcatggtcttgctctattgcatatatatatatatgtatatatgaatgctattccacaataaagaggaacaaattaatgccattcatagcaacttggatggaattggagaccattattcttagtgaaataactcaggaatagaaaaccaaatattgtttgttctcactcataagtgggagttaagctatgaggatgcaaaggcataagaatgatacaatggacttcagggatggaggggagggaaggatgggagaggggtgaaggaagaaagactacaaattgggtacagtgtatactgctcaggtgatgggtgcaccaaaatctcacacatcaccgctaaagaatttattcgtgtaaccaaatgcaacctgtttctcaaaatcctattaaaataaaaataaatcaaaaaattaaaagccattgcaaataaagacaaaatcagatgttttataaatataagtgataaaatttctctattaaaagtttatagagttcatcagtgttgatattatctttccaaattaaaaaatgttttgtttgttgtttgttttggtttttgtttgtttgtattgatgcatggtcttgctctgttgcttactgcagcctcaacttcctaggcatgagtaatcctcccacctcagtgtcccaagtaagtggaactacaggtgtgcaccatcatgcctaactgatttttaaaaattttcttatagagatagagtctcactgtgttgcctaggctggtctgaaacatgtgtgttcaaacaatcctcccagcttggacagaaaaaatgttggaattacaggcacaagccatcatgtctggacagaatttttttttttttttttttttttgag[135 bp omitted]cacgcccggctaatttttttgtatttttagtagagacgggttttcacc[137 bp omitted]ggatgaaagacataacaaggcactgaaatgaaaaatgacgaaaaggcatcaactatgaccaccttgttatcacaaaaatgaaaaccaacatcatttttacatatcaagttcacaaagattaaacataaatcccttgatcctcaatagtgtgaaaaaatggacacgtttacattttaggctgacagaaaaaaacaaaaacagtttttcctccgctctcacatcacaacaatcaacacagaagatttctgtgacgatatgtctagggatttctctcggtcagtcaagcacacaatccattctgctgtggagagcagctgggtgtcttctaattcatttatgacactatctaactggacatagcattagattccacagggctcagttccgcaagactggcctcccactctaataacaatggcaagccatacgttgttttacctatgctttcatcaactagctataaatcaggtttccaccgctccctattttagttgcattactttcctcgaacagctcacagcacgcagggaaacactgacatttacaactttaccatagcggatattgcaaaaaatccagaaaaaaagattcatgggtcctggcagggggaaggggcgcactactttccaggaagttttacccagaagctctctaaacccagtccttttgagtttctatgaaggcttcactctataggcatgataggttaagccatacgctattggtgatcaactcaaccttcaggcactcaaccctcctggaaaatggggttcaggcactgccattctcagtctgaataatagaatttacataaacagaattttacaacagattagcataactgaaaactgaattagatgattgaattatctggagccacaccttgatattcctaatccaatcaccctcatccaatgaatgctccacccaactggccccgaagtatctagatggttccagagcagaagaatgtttatacaacggatatctcccctttttctcaaaagtcgtttcgcttacacgggtaattcttaaactgccatgcatcagagtcagggggagggcttgttacaacacagatctgtggatctccggggtttgagggttgcaaggatgctgctggtgtcaaaaccacaatgtgagaaccacagaaccactagatggttttcagtgtttcagtgcatttaattcataatatatttcaccaagaaaacttgtaagttcttagattgtcccaaatgtggcgcatgaaatcaaatcaggagaacagtttcctacgcggtgtaacctgggaaagttgggggtgactgatggaaaggaggagtgaagctccgccctttccgctgccaggctgcgcccgcccgaggctatttaaacccaccctggcgggcctgtactcagatcttcacagagcggagcagcggccggagcgttttgcgggctctgcgtggacttggagcttacagcgtcttgcgacttggaagcagattcagaggacaggacagaacacttgggtaagtgaatctctgtctgtctgtctgtctgtctgtctcattggttggtttatttccattttcttaaggagcacatacctcacatcacacacacacacacacacacacacacacacacacacacacacactccttctttctgcgggttagaaaactggtaggcttctctgggagctacaggtttcctaatcatgtctgcacctaagaacagtagggtcttgtctggctcttcttatgaaccgtcccccagcccggactccccaagatccatgctagcctcacccagcttctccctctcccctctcagaaactcagacttaagaggaagctcctcaccagggatccggagctaccgttcaccctcccctagggcttcaccacactcacctctgtcatcaccagaatcccacaagctcccatttccctttcctcaaccgtgatgggcaatcaatgaagccattgggttctcccgcgtcctcctctggggattctttagaatcaccacgttcatcaataatataacacatgttcttactgccatcacccagcagctcacccccggctctctgggaatctcctgtgcctcccagccactctccgaacaaccccggatttcagctggagtcagccccccacacccaggaatcacctacaaactcacgagcctcacggtgctcctcccctgtgtctttcatctcttcacccccaggcctcagggactctcctgtgcctaccagttactctccagccatccccaggtttctgcgggagtcagcctcatgcacccaggagtcccccagagactcacacgtctcgggagattatgagcggtcccccagccctgactcctcaagattcatgcctgcctcacccagcttctccctctcccctcccagaaactcagacccaaggggcagctcctcgccagggatgtggaagtactctacatcatcccgcagggcttcaccactctcacatccatcatcaacagaatttcacaactttacatttccctttcctgaccaagcaggacaatcactgatgtcattgtgctctcccggacaatcactgatgtcattgtgctctcccgtgtcctcctctggagattcttcacagtcacctcattcatcaataatataccatatgttcttactgccatcatccagcagctcacccccagccatcaatgactctcctgtctgtcccagctactctccaactacgcccagatttcagcgggagtcggtctcccactccccagaaacacctacaaactcacagacctcagtgagatcctcgccagtctctctcatgtcttcacccccagcccttacggaccctcctgtctgtcccagctactctccaaccacgcccacatttcagcgggggtcattttcaggaacccagggatcactaccaagctcaccactttcactgagttactccccagtctctagcaggtctttatccccaagcctcagggactctcctgtccgtcccagctactctccaaccacgcccagattgcagctggagtcagttccaggcaccctggaatcaccaccaaactcaccaatttcactcaattactccccagtctctctcatgtcttcaccagccctcagggactctcctctgtgtcccagctactctcataccacgcccacatttcagcaggagtcacttccaggcacccagaaatcaccaccaaactcaccaatttcactcacttactctccagtctctctcatgtcttcaccagccctcagggactctcctgtctgtcccggctactctccaaccacgcccagattgcagctggagtcagttccaggcaccccggaatcaccaccaaactcaccagtttcactgagttactccccggtctctctcatgtcttcacccccagccctcagggactctcctgtgtgtcccagctactctccaaccacgcccagatttcagcgggagtcagttgcaggcacccaggaatcacctacaaactcaccagtttcactgagttactccccagtctctctcaagtcttcaccgccagcctcctgggactctcctgtctgtcccacctactctcccgccacgcccagatttcagcgggagtcagcctcctacactcaggaatcacctacagactcacagacctcactgagatcctccctggtctctctcagctctttgccctcagcccacagggactgttgtgtctctttcagctactctcaaaacttctctagattcccgctggagtcagttccaggcacccaggacacaccagcaaactcaccaatttcactcagttactccccagtctcgctcatgttttcacccccagccctcagggactgttctgtctctctcagttactctccaaccatctccagatttcagctggagtcagcttcccacacccaggaatcacctacaaactcacggaccttactgccaccctcccccatttctttcacctcttcacccccagccttcagggactctcctgtgtctcccagcttctctctggccttccccagatttctgccgcggtcagccccaggcacccaggagaaccctagacactcacaggcctcacgagactatttccctgtgacctgtatctatacaggggtggctcccacgtatccctcagtgaccccaaacccatctccacttacactcagacactcccagggcctgacagctactccccgttattgtccttcagttggaagccctggccaatctactagccaacatgacgcagttacctggccatttctccacattcctggtgagcgccccacacccagccgcagaaaagcccctcctgcattccgtcctcacacacaggcctgtccatctacttgctactgtcacactcttgccagcagaagaggcccctctaatggccgatatcaccgcccaggctatcctcaccccacagctgtgcagcgggaccctcctgctggcccacgtggctgccagagcccatgctgacaccaacctccagcatgtcggcatccctgcgggcgacactaccggtgacatggccagcatgaccctcctccctggcagtgacactgttgatgtgagccccagtttcagatctgtcatttgtaaataggaccattttcccttttctctctcgcttccattcacagggcttttcattctctctgtttctgcctccgtttcagatatttactcacctttttctctttcactatgtctgccgtggtctcgacgagagtgcgccacataagattcccccattaaaagtcatgaattgagtggcttttagtatacttgtggttgtgcacgttcaattttaattcgcaatccatttgagaacattttatcacccccgaccagagaaaaaccctctaaacgtcagtcactcctcattctgtctcaaactctctccctgaccctcaaccctaggtaacaactacatagagcgctcaaccctatctccttagatttccatattgtggacatttcctatcaacagaattataacatatgtgaacttttatgaccgactttacacttagcacaatattttcaaggttcatccacattgtagcattacccacagtgggaaaccattttttttttttttggttttagtaacaccaggtgttttctccttccttctttccttccttccttccttccttccttccttccttccttcctcccttcctcctatttctctcttactccttctgccctctctctttcacatgccttcggtgcatcctactttctgtgtgtttttgggaaatcctcgacagttgcaggaaaattgtgttattgttattatttaccggtatctctctttcatggttctccatcagttgtaaacatctactggtttctcccaagtcactaagtatattttaatgaggtacacctgtttttctttatacagctatttctggagtgtagggtcacatactgataaacccaatgtgacccaaaaacgcatctaataccccaataaacccatcataaagttgaaaaatcataaatcaaaccatcataagtcacggtttgtccgtggatatgggcttcatcaattccattgtattcaataatgctctgcacgattaacaatggcagactgatagggagtggatactgatagcattttaaaaatcagttattagagggatactttaacctgactgaataactgatctaattgtattagtacggtgaataattatgtgaaatgttttgagacagtgtagtacatttgtgaatgaaattttgtggcttttttccacttagtaggaacctttgtgtgtagaaaactgagaagattgctttctgctgtagagtctggcattcgttgtagattaaagcttatttttctgcgaataagccatagtcaataaaatactattctttaaaaaaataaaaaacactggtgatgtgaagtcattatcctcagcaaactaatccatgaacagaaaaccaaaaccacattttcacctataatgggagctgaaaaatgagaacacatggacacaggaaggggaacaacacacactggggcctttcgggaagcagagcgttaagaaaaacagctaatgcatgctgggcttaatccctaggtgatgggtcgacaggtgcagcaaaccaccatggcacacgtttacctttgtaacaaatctgcacatcctgcacatataccccagaacttagaaacaaaacgaaacaaatcaaaaggaaaaaacaataacaaaacgctagtggcaaaataaagtttcaaactgagaaagcgatagagcaatttttggttgaaatcatggttctcaacccaggtgccataaggtcaggataaagaatttgattacgtattgtaaataagacatacagcaaatgactagaaaaattattctcaacatatatgtgccttctaattcaatgatgacgctatctaccgggacatagcattagattccaaagggctcagtcccgcaagactggcctccctctctaataacaatgggaagccctatgttgttttacctgtgcttcttagcaactggctataaatcaggtttccaccactccctgttgtaattgcattaatttgctggaagagctcacagcacgcagggaaatacttccatttaccattttatgatagcggatattgcaaaaaatttagaaaacagattatgggcctggcatgtggggaggggcgcactgccttccaggaagtgttatccacaagctctctaaacccagtccttttgggtttttacggagacctcattctataggcatgatgggttaaaccataggcgattggtgatcagctcaacctgaggctctcaaccctccctggaaattggggttgaggcattgccattctcagtctgagtagaagaatttacacaaacggaattttaagacagattagcaaaactgaaaactgaattagatgattgaattatctggagccacatcttgatattcctaacccgagcaccctcatccaacgaatgctccacccaactggctcctaagtctccacgtggttccagagcaaaagaatgttcctacaacgcatatctcccctttttcttcaaagtcttttcgcttacacgggtaattcttaaactgccatgcatcagggtcagggggagggcttgttacaacacagatctgtggatctccggggtttgagggttgcaaggatgctgctggtgtcaaaaccacaatgtgagaaccacagaaccactagatggttttcagtgtttcagtgcatttaattcataatatatttggccaaaaaaactcgtaagttcttagattgtcccaaatgtggcgcatgaaatcaaatcaggagaacagtttcctactcggtgtaacctgggaaagttgggggtgactgatggaaaggaggagtgaagctccgccctttccgctgccaggctgcgcccgcccgaggctatttaaactcaccctggcgggcctgtactcagatcttcacagagcggagcagcggccggagcgttttgcgggctctgcgtggacttggagcttacagcgtcttgcgacttggaagcggattcagaggacaggacagaacacttgggtaagtgaatctctgtctgtctgtctcattggttggtttatttccattttcttaaggaacccatacctcacaccacacacaaacacacacacacacacacacacaaacacacacccactccttctttctgcaagttagaaaattggtaggcgtccctgggagctacaggtttcctaatcatgtgtgcacttaagaacagtagggtcttgtctggctcttcttatgaaccgtcccccagcccagactccccaagatccatgctagcctcacccagcttctccctctcccctctcagaaactcagacttaagaggaagcttctcaccagggatccggggctaccattcaccatcccctagggcttcaccacactcacctctgtcatcaccagaatcccacaagctcccatttccctttcctcaccatgatgggcaatcaatgaagccattgggctctcccgtgtcctcctctgggcattctttagaatcaccacgttcatcaataatataccacatgttcttactgccgtcacccagcagctcacccccagctctcggggactcttctgtgtctcccagctcctccccagacaaaccagatttctgacccagtcagcctgccgcacccacgaagccgagagacacttacagacctcactggcatcctcccctatgtctcccatctcatcacccccagccccatgctcttaacactgaactatctatgtctcatatatacagcagcaaaacaaaaccagagaaagtggaaagcagataatacagaaaaaacagaggtgaatgaaatgaaaaatataattttctgggaatatatagagaacgcaaatatatttaacaagcagtataaatgctaaataaaactacaacctcagaagaaaccttaggttaatccccaaataggaaatctattctgaatgctctaagagggaaataacaccaaccttcaatgaggtgattattacaataaacttttccagagagcagaacgcgctaggagcttcttattatattactaccacaaatcctagtataattttgataaccaaattataccataatagaacaacaacaactacaacaacaacaaataaagccagaaaactaaaggaaaatgtttcaacgaataggactgcaaaattgtatgaaaagcagcaaacaaaatccagcaatatattgaaatttttacagtacaacagtaatgcatggaaattaatcattactacatttagcaatataaatcatcatattaagaaatattactttctaaaacatatcaccatgaaaataaatgtcaatcaacagtttgaaagtaattttcttgttaatatatataacaggaaaaaagatcaaaacctagaaaaaatacacaaaaagagttcatagataagatgaatacctaaacagaaagaaacaaggagtaaatagcaagggaaatacaaaggaataagcttataagaggatgaagagtcagggagatgtggctcacacccgtgatcccatcactttggtaggccaaggcaggagaatcacttgagcccaggattttgagacaagcctgggcaacatagtgagacctcgactccacaaaaaaaataaaagaaaattatcaggtgcagtggtgcacacctgtagttgcagctactcaagaggctgaggatctcttgaggctctgatccgaccatagcactaaagcctgggtgacaggctgagatcctttctcaaaaaaaaaaaaaaagaaaaaaaaaaagaggatggccaatatctcctacctggaaaaattcacataacgtaatgccataattgttcacctgatggaaaaaaataaaaggattaataagagccaggtttttttgtttgtttttcttttcacatggagtcttgctctttcacccaggctggagtgcagtggcttccgcctcagcctcctgagtagctgggactacaggcgcccaccaccacacccggctaatttttctactatcagtagagacggggcttcacaatgttggccaggatggtctcgatctcttgatctcgtgattcacccgcctcagcctcccaaagtgctgggattacaggtgtgagccattgcgcccggcctaaaatttttttttaattaaaaattaaataactaaaaaatgggtgaaagacatgacaaggcagtgaaaagaaaaatgacaaaaacacatcaactatgaccaccttgactgttagcaataaaatgaaaaccaacatcctttttatatatcaagttgacaaagattaaacatttttattataaatcatgtgatcctaaatagtgtgagaaaatagacccttttacattttaggctcagcgaaaaaaacaaaaactgtttttcctctgctctcacatcacaacaatcaacacagaagattcctgtgacaacatgtctggggatttctctcggtcagtcaagcacaccatccattctgctgtggacgccagctgggtgtcttctaattcaatgatgacactatctacctggccatagcattagattccacagggctcagttctgcaagactcgcctcccactgtaataacaatggcaagtcctatgttgttttacctgtgcttctgaccaactgggtataaatcaggtttccaccactccctgtttcagttgaattaatttgctagaacagctcacaccacacagggaaacacttacatttaccattttattatagaggatgttgcaaaaaattcagaaaaaaagattcatggggcctggcatggggggaggggtgcactaccttccaggaagttttatccagaagccctataaacccagtccttttttgtttttatggaggcttcattacataggcatgatgggttaaaccatcggctattggtgatcaactcaacctcaggctctcaaccctccctggaaattggggttgaggcattgccattcttggtctgagtaatagaatttacataaacggaattttaaaacagattagcataactgaaaacttaattagatggtctaattatctggagccacaccttgatattcctaacctcaccaccctcatcctatgaatgctccacccacctggccccaaagtctctacatggttccagagcagaagaatgtttatacaatgcatatctccactttttcttaaaagtctttttgcttacatgggtaattcttaaactgccatacatcagggtcagggggaaggcttgagagaacctagatttgtggatctccggggcttgagggttgcaaggatgctgctggtctcaaaaccacaacgtgagaaccacagcactagatagttttcaatgcatttaattaataatatatttggccaacaaaatttctaatttcttagattgtcccaaatgcgtcacatgacatcaaatcaggagagcagtttcctaggagatggagcctggaaaagttgggggagacacatgaaaggaggagtgaagctccgccctttctgctgccaggctgcacctgaggctatttaaacccaccctggcgggcctgtgcccagatcttcccagagcagagcagtggctgcagtgtcactgcaatggccaccactgccagaatggtgttacatcagtctattcaaaaggctcattttgttaatgattggcaagccaattccacccaaatgtggaattctcaacaaggcattgatcaaaaattggctaatcaaattaattatttaagacagtctgttacttggcttggagattgggtagtgagtctcaaacatcgaatgcaaatgcagtgtgattggaacacttcagatttctgtatcaccccatgttcctataaagagactgatcattcatggtaaatggtcaaaggacaccttctgggtagggaagataatttatcatttaatttaagataaattaaagaaacaaatttttgaagcttctcaagctcacttatccattgtgcctggagctgaggtgttagatcaggtggcagaaaatctttatggattaaaccccatgacttggattaagtctattgggggctcctctgcagtgaattttggaaatatgtttctctgtttaatcagcttgtctttagtgtgtggaaccagtcaaagaatcctgagtcaaaattgagagaacgaacaagccttcatcaccttggcacatttatataaaaaaaaaaaaaaatgggagagatgttgcgggaagtcagggactccgaacgttgggacaggctgaagccatggcagaagaacataaattgtgaatatttcatggacgtttatcatttccccaatcaatactcctgttttttcctatgcctgtctttaatctcttaatcctgtcatcttcgtaaactgaggatgaatgtcgcctctggaccctgtgatgattgcattatctgcacaaattgtttaaaaaatatgaaatctgggcaccttgaaaaaagaacaggataacagtgatgttcagggaataagggagataaccattagatctggctgcctgagagccaggcagaacacagccatatttctcttctttcaaaagcaaataggagaaatattgctgaattctttttctcagcaaggaacagccctgagaaagggaatgcgttcctaggggtaggcctctgaaattgcagctctggggacgtctgtcttttatggttgcagataagggatgaaataagccctggtctcccgttgcactcccaggccaattaggatgaggaaattcccgcctaataaattttggtcagaccggttgtctgctctcaaaccatgtctcctgataaatgttatcaatgacaatgcatgcccaaaacttcattagcaattttaattttgccccagtcctgtgatctcaccctgcctccatttgtgttgtgatattttattaccttgtgaagtatgtgatctctgcgacccacaccctattcgtacactacctccacttttgaaaatcactaataaaaacttgctggttttgcggcttggaggtgcatcacggaacctgccaacatgtgatgtctcccccagacacccagctttaaaaatttctctctttgtactctttccctttatttctcagaccggccaacacttagggaaaatagaaaaggactcttgttgaatcatcatgggtgggttcccccagtgcataggtatacataggccatggtgatttgctgtatgcatcaacccatcatctacatgtgccatggtgatttgctgcacacatcaacccatcatctacattaggtatttctcctaatgctatccctccccttgccctccacccaccaacaggccccggtgtgtgatgttcccttcccagtgcccatatgttctcattgttcaactcccacttatgagtgagaatatgcagtgtttggttttctgttcctgtgttagtttcctgagattgatggtttccagcttcatccatgtccctgcaaaggacatgaactcattcttttttatggctgcatagtattccatggtgtatatgtgccatattttctttatccagtctatgattgatgggcatctgggttggttccaagtctttgctattatgaatagtgctgcaataaacatacacgtgcattcatctttatagtagaatgatttataatcctttgggtatgtacccagtaatgggattgctgggtcaaatggtatttctggttctagatccttgaggaattgccacactgtcttccacaatggttcaactaattgacactcccaccaacagtgtaaaagcattactatttttccacattctctccagcatctgttgtttcctgactttttaatgatcgccattctaactggcatcagaatgtatctcatcgtggttttgatttacatttctctaatgacccatgatgatgggctttctttcatatgtttgttggccgcataaatgtcttcttttgagaagtgtttgttcatatcctttgcccactttttgatggggttgttttttgcctgtaagtttgtttaagttccttgtcgattttggatattagacccttgtcagatgggtagcttgcaaaaattttctcccattctgtaggttgccagatcactctgatgatagtttcttctgctgtgcagaagctctttaatttgattagatcccatttgttaattttggcttttgttgcaattgctattggtgttttagtcatgaagtctttgcccatgcctatgtcctgaatggtatggcctaggtttatttctagcgtttttatggttttgggttttacatttaagtctttaatcaatcttgagttaatttttgtataaggtgtaatgaaggggttcagtttctattttctgcacatgtctagccagttttcccagcaccattaaatagggaatcctttccccattgctttttttgtcaggtttatcaagatcagatggttgtagatgtgtggtgttatttctgaggtctctgctctgtaccattggtctatatatctgttttggtaccagtaccatgctgttttggttactgtagccttgtagtatagtttgaagtcaggtagcctgatgcctcctctagctttgttctttttgcttaggattgtcttggctatacaggctcttttttgattctatatgaaatttaaagtagttttttctaattctgcaaagaaagtcagtggtaccttgatgggaatagcattgaatctataaattactgtgggcagtatggtggccattctcttgatattgattcttcctatccatgagcatggagtgtttttccatttgtttgtgtcctctcttatttccttgggcagttgtttgtagttctccttgaagaagtccttcacatcccttgtaagttgtattcctaggtattttattctctttctagcaattgtgaatgggagttcactcatgatttggctgtttgtctattgttggtggataggaatgcttgtgaattttgcatgttgattttgtatcctgagactttgctgaagttgcttatcagcttaaggagtttttgggctgagatgatggggtttcctacatatacaattatgtcatatgcaaacagaaacaattagacttcctctcttcctatttgaatatgctttatttctttctcttgcctgattgccccagccagaacttccaatactatgttgaataggagtggtgagagagaacatccttgtcttgtgctggttttcaaagggaatgcttccagattttgcccatttcatatgatattgcctatgggtttgtcataaatatctcactattttcagatatgttccatcaatacctagtttattgagattttttttagcatgaagggatattcaattttatctaaggcctttctttattgagataatcatgtggtttttgtcattggttctgtttatgttatggattatgattattgatttgcgtatgttgaaccagccttgcatcccagggatgaagctgacttgattgtggttgataagctttttgatgtgctgctgaatttggtttgccagtattttatggaggatttccgcattgatgttcatcagggatattggcctgaaattttctttttttgttgtatctctgccaggttttggtttgagggtgatgctggcctcataacatgggttatggaggaatccctctttttctattgtttataatagtttcagaaggaatggtaccagctcctctttgtagaattcggtagaatttggctgtaaatccatctggtcctgggctattttggtgggagactattaattactgccttaatttcagaaattgttattggtctactcagggattcgacttcttcctgatttagtcttgggaggatttatgtgtccaggaatttttccatttcttctagattttctatttatttgtgtagaggtatttatagtattctctgatggtaatttgtatttctgtgggatcagtggtgatatcctgtttataatttttcgttgtgtctatttgattcttctctcttttcttcttcattagtgtagctagttgtccatgtaattttgttaatcttttcaaaaaaccaggtcctggattcattgatttttttgaagaatatttcatgtctctatctccttcagttctgctctgatcttagttatttcttgccttctgctagcttttgaatttgtttgctgttgcttctctagttcttttaattgtgatgttaaggtgttgataggaaggctgggcaccttcctatcaggtagatggtctagagctccagacagcaccaactcctcctcatggcctctttctcctcctacaactcttcattctcaagcctcagccctttcccgagataggaaggacaagaccatgtttcaggttggttgttttctcttgtgaaataccacctcaggcatcagaaagcaaacatacctcccccgctggtaaaaggaaaaagagtgaaaatgtattgtgtgaatacattacatttctatgtgaggcagagtgtgtgattctgttttagagatgaagaaaggaatggtggatctcagacttaaacccaggtcagtacgacttcatgatctgcctttctgctctgcttgctgcctgcctatgatagcttcatgcaagggcccatgcccagattatgcagagagatgactcttaatggttgcactcttagtggttaaaatagggtctgacatagtatctattgactggccaaatgtcagtagtagccattcgagaggctgaatgtgatatacagtcactcctgagggccaaattgcacaatcccatgttacactgtgactctggggttcagtgcaacaggcttaggtgttttcggtattcttagcaacacatctggatgcaagagattgctcaagtcatcttaaaggcatagtgttacttcacaaagcccttattatacttgagatatgtgcattcaggctgacgactgtcctgaagtatagttgcaacttgtttagatccacaaatgcttctgggatattggtatcctttgtatctgaacccaccttaccaaacggccacatcaacttcttggtaggacacaatgttactatcagcatgaaccttatattctgaccagacccatctcccctaccaacccactccagttagagacaacttgcttaatatctgtctctatgtactaccagattttatttccaatgttgtccccacagacgggctgcttttacaactctgcaaatccccttaaacttgtattaacctttctaccatatagcattaaaaaaaatgacaccagagagtaacacctcattttatctcatagaaggcactgaattcctacccctacagtaacccattgcacaacagttgcagctttctctccttaactgtctgtataccttactgccactgaaatcctagcagctgggtggcacctgagtaaactttaggcaaccccgtgagacctcaaggactgcagaccccaaagtagaaaagagacaacacaagtgcacaaggcagactcactgttggcatgtccatcctatccacattagtctcccatgattacataggtggtgtggttttaagatgtgacccctccccttaagtgtagcctagacttagtactcatgaatatagcagaagtgatggtgacttaagagactgggtcataaaaggcaccctggcttctggcttgctctctcctttctgattacttactcggggggatgtcagttgctacaagatgaaggcctttagccctgggaggcccacaaggtgagaaactgagacctctattaacagccagcaaggaactgaaggctcctgcctgaagtgatcttgggagcagaccttgtaggccccagtccagcattcagatgactgcagcccctgccaacatttgacagctgcctccacaacactgggggagatactgcccagaatttgaggagtctgctgacaacctctgggaatacagaatgagttaaacttttcagccacaaactttgaggtctgaggggtgtctgcatttgttctgttggccataaaaccctacatcccaagtgactctgctgcagttccataaattacttttcatccctaccccttgcccccttctgaaaccttatttcccacggtaaatactttggttatctatatataaagtgcctgttccccacctcttgacatgtcttctctctttggcagctccaggcagcagaaggctcagaccagagcagacccaggtctcctgagtcaccaagacagagagcttatcctggaggaacacatgatggtgtgctgccctctacaaaaccaggcttgtgggctcactagttcaagaaggcaggactgaaaaatggaaacaccgtggctcctaattatctagactgcctcatctcctaccagccagcaaaaatgatgtagcctctgagaatatttacatcactcatttgtatgccttatctttggtacagggagttgggtgaacaggagaaaaagccaaaaaagttatagaggttacaacatgaatctttaatcataagggattgttccatcaggctaatttataaaaaatagctctactgttattataaaactgaaagatactttgttacaaagtaaaatacataaaagtacaacatatgtattatacattcagaatcccaccactagagataagtagttatatgtcctctcccacatctttttttctctgttgctctaaacatacacacagaaaaacatactaacaaaatggggtcatgctataattgttgttctaaaactctcctggttcactaaatacttcatgagcaacctgcattgtcattatctgtgtgcctgaagatttctagtggctttccattgcatacatatgcctgaacttatctaaaaaatttcctaccaatggaaactggaatattaacatttgctattttaaaaatgttttaaatttaaaaactccaccttctgcatgcgtttttgcccaagtgggcaactatctcccaagtatcaattactacatatttactgccacttcaaaggttatagaaattgaattgatacgttaatgaattcttttgaaaacaatgcacggattttctctctcaccaataagtacataagacttattacgtccatttttgcactgctataaagaactacctgagactaggtaatttgcaaaggaaagaggtttaactcacacacagttccacatggctggggaggcctccgaaaacttagtcatggcagaacgcaaaagagaaataaggaccttcttcacaaggggacaggagagagacagcgaggaagggctacaccttaaaaccatcagctctcatgagaactcactatcatgagaacagcaagggagaaatctgccctcgtgatccaatcatctcccaccaaggccctcctctgacacgtggggattaaaattgagatgagatttgggtggggacaagagccaaaccatatcagactgtttctacaacccccccccccgcccccactgatgggggatttgatgattctattttaatactgctaacctgcagggtgaaatagcatttgtgatttttaagatacctaatatttgatatgttaaactatgaaatgaactggagcaaaaccattatattcatgacagcaataaaacaaattcctagaaatatgcttaagatgactcagaacctatttttaaccatctctaagaaatattactgagggaccatatgaaatactatcagtggtaaaaaaaaagtcatttttttaaagtgaaaaaaaatcagcatttcaaagacgccacattctttcaaaattaacctataaattcaatgcaatgccaattaataaatttatttaattaataattcaatgcaatgccaatcagattttgctttttgaacctggaaagaagacatatttctgtagtgtactacaactcctctgaaagctgtaaagcttacctgcaagataaaacagtcataaaaacatgataaaaatgtgagacacacacatcacccagatctgccaagagaactttgttcctggtcttctcagagtgacttgtttcaataaatgttaatgttatctttttgtttttataaagcgatctttaaaaagatatgtaccaaactggttttagaaaggtggaaacttgtttctacactgtcccattggtagctatcaacccacacaaagaatctatgtccataattagcaccttggaaacattctcaccacttgtacattgtaaaagctccctcccaggcagattctgatggaagtgaggattattactgaaaccactgctgcactgtttctttaaagcctactccgctgcacaacagactcttaaagactgaagtttgtaactgaagtgctaacctatttatcacacatccaggtgttcccttcctatgcagactagaaaatgtaaaatcatcagtttctcctatagccctcctacatgtcactttcctatggtttttctcctgtgttggctctcagatggatagaaagctctgagtcccagatggaatcctctatgtacatctacttataagggttctcgcctaaatgcactctttggtggttccgcagacctgaggtataactgaagcctttcccacacacaccacacgtatagggcttctctccagtgtggactctctgatgaacatgaagacaggagttgcggccaaagcccttcccacactcctcacatttatagggtttctcaccagtgtggaccctctgatgaccttgaagatgtgagctctgactatagcccttcccacacacgtggcatctgtatggcttctcgccagtgtgcactctcttatgactaaggagacctgagccatatctgaaacccttcccacattcacaacaagtgtagggtttctctcctgtgtgcaacctctggtgggtgcgaagattagagccataactgaatcccttgccacactgatcacacgtatagggcttttttcccgtgtggactcgctgatgtttgtgaaggcttgatgtgcacctaaagccctttccgcactcttggcatctgtaaggtttctcgcctgtgtggactctctggtgaatgagaagccctgagctgtaactgaagcctttgccacactcagcacatttatagggtttctctccagtgtggaccctctgatggataaggaggtcggagctgtagatgaaacccttcccacacacgtcacacacgtagggcctctctcccgtgtggaccctctggtggctgtgaaggtctgaattccgccggaagcccttcccacactcactgcatttatagggtttctctcctgtgtggaccctctgatggatgtggaggtcggagctccggccaaagctcttcccgcactcgcatttgtagggtttctctcctgtgtgcagtctctgatgcatgagaagccctgagctgtaactgaaactcttaccacacacgttacatttgtacagatgctgccccatgtgaactctctggtgagcttgaaggtacgagttgtgactgaaacctttgccacacttgtcacactggtagggcctctcgccggtgtgtgtcttctgatgactgctgaggtgggagctgcagctgaatccctttccacactcgccacagctgtagggcttttctccagggtgaatgtgctggtgtttgtgcagtgcagacttggcacagaagcctttgccacactcgctgcaggtgtagggcttctcccctgtgtgcagcctctgatggacttgaagcactgagctgtaactgaagcccttcccacactcgctgcatttatatggtttctctccagtgtggaccctctgatggacaagcaggtttgaacttcgaccaaatgccttcccacactcctcacatttatagggtctccttcctgtgtgcaccccttgatgaataagaagaaccgatttatacctgaacccctttccacagacatcacatctatagggcatgtctcccacaggggctctggggtggttacgtatgtgcgtgttctgtctgacgccccgaccacgctcaagactcttaacagatttctctcctgtgggaactctttgatgtctgttaagatgggcactgtgcctcaagccctcactaaactcatcatattgacagagtttctctttcaaaggtactcttggatgcgggggaaggtctgcatcgtccctgaagccatttctgtattcgttacttttcaagccattctctccagggttaatgcgatgaagtacagagtttttaatgcagtcttttctgcatttattgcaaccacacggcttgtctatttcagggaatctgtgatcaacatgacaagatatccagcaaaagctgtcatcatcccagttacatttatatactgtgtcttctgtgtcgagatttttacatctttcttgaacatcccctaactggttcacaaacgcttttgcccaagatccttgaatggggattggtcttatagctctccaggctggaaactgttgattttctagaccgataagcccatccccttgtagactgtccaggaaattctcaattggaaaacacggcgtagatgctccttcccacccttgatggggagcagcatcttctgagaactggaagtcttttccttgcagatttactctacagtcttggctcccaggtaattcacctgccacctcttcccagattttgcatgaggagagctctttgtgtgaaaagaaccttaattcttcatcttgaatatactccgtatcctttccattcttgtctcctatgaggttaaagacaattcagagatgagaactagtaaaagactggctcagggacatcagactttcagacttgaactaataatagcctagagaaaaattaggctttatgtatcataactattagagcacttatgtttatgacaagaggaggctcctattaataagttttgaagctaaatgctagtatgatcctattagtaccaaactatgtctcatcatagaattgccaggcaaaaaaagaatttcggaacagatttttatagagaaagttcacttcttcgcttaataatgctgttataactaataatatctgacactattgtaacacttcctatctgccaatgatgtacacatattaactgacttaaacctcagaataatactgaagtagaaaccattatattaccttcattttccaatgatgaaaccaagtcagagagagggtaggtaacctagcacactattccaccatactgtgaggcagtggtggagctggcatttaaatgcaggaagcccacacggccttctccctgcactgtgtctcaggggtgactgtacttctgggtatttgtgagccatacttcaggagggtgccaaattttccaaagtgcaccacctgtgtcatcttgtgtgagcagatgcaataggaatccagaaaatactgttaaggcaggaagacacacaaatatttgacttatgactattacttatgccttgagaacctttggatcccaggctgcaaaggatcaaactgtcatatttaccacagttctggatgattttaaaaatttgtccatgttttctgatattctttattgcctatttttatctttcagggcttgggtaacaagaacctgtttataaccagggactagtacaatactagaagaaagtgagaaattcatctgaggactctcaatattctgggacagtctctgccactggcttgccttctactgcctggctgtttctattagagggacggaagtccagaggtccctcgctcattctgggtatgatattctgtgaaaggcatagagaaaccatgagaaggtaggaactgaacggaagaaatgaagttgcagaataatcatctacaatgctgccaacagtacccacaggcaagacaaggggtgaggaatgggacctcctgtgggcaagctcacttctcactgcccagcaaggctcttgtctccaagacctctaggcctcatggttctcacctggagatgcatttcttggagtttctccatctgttaccccagtcttcaaaaattcctatgttgaaatcctaaatcccaacgtgataccattaggaggtggtgggtcttccggaggtaattaagtcatggaggtggaacccccaggaaagaaattagtgtccttagaaaacagatgcccagagagctcttctctgctacgtgaggacacaaaaggaagtcagctatctgcaccctgacagagggtcctcaccagaacccaactatgctggcaccctgatctcagactgtgccttccagaaataaacttctgttgtttatatgccactcagtctggcaattttttacagcagctgaaactaagagttctataaaaataggatttaacctgtgtaaaaaagccaaaaatatcttctctccaggaacaagaacactccaagaagttcagttccaattacccagaggattcctctcacccactgagagtaggttcctgaaattctcctgcatcacatcttggtacagctgcctctgggtagagtccagcagctctagctcctcctcagtgaagaccacagccacgtccttgaagctcaatggctcctaaaatgaaaaaccattaacacaaacatctactagatgaagacaaactggtgtccacagagcaggtttatagaaataaaaaaatttaaaaatctggattaagaaaatgtggcacatatacaccatggaatactatgcagccataaaaaatgatgagttcatgtcctttgtagggacatggatgaagctggaaaccatcattctcagcaaactatcgcaaggacaaaaaaaccaaactccgcatgttctcactcataggtgggaattgaacaatgagaacacatggacacaggaaggggaacatcacacaccggggactgttgtggggtggggggagtggggagggatagcattaggagatatacctaatgctaaatgacgaggtaatgggtgcagcacaccaacacggcacatgtatacatatgtaactaacctgcacattgtgcacatgtaccctaaaacttaaagtataataataataaaattaaataaataaataaaaatctaaacaataaagataaactgcatatctctaaaaaaagaagacaagatagcaggaagttgttcagcccggtgtgtcaactccagtttattaatgtttggtgccagtaatttcaattctaaccaactgaactaccccagatatgcagcatcaagcaagaaacacatcatatcctgtgctcacttggggcacttttttttggacacagggtctcttactttgtagctcaggatggcatgcactggtgcaatcacagctcactgcagcctcaatctccagggttcaagcaatccccatgcctcactcaacctcccaagtagctaggactacaggcacgcaccaccacatccagctaatttttatttttttgtagagatgggaccttgctatgttgctccggctggtctcaaattcatggcttcaagtgattctaccatcttagcctcacaaagtgttgggattaacaggggtgagccactgatatttggatatttgcccactgatatagtttgggtatttgtccctgaccaaatctcatgctgaactgtaatccccagtactaggaagtgggggtgggaggtgtttggatcatgcggtcagatccctcatgacttggcgctatcttcatgatagtgagttcttgtgagatctggtcatttaaaattgtatggtacctctacccccgccccccaactctcccgccacacttcttgctttaggcatataaagttcctgctctcctttcaccttccattatgactgtaagctttctgaggcctccttagaagcccagcaaatgccagcgcaatgcttcctgtttagcctgcagaactgtgagccaattaaacctcttttctttataaatcacccagtctcgggtttttgttttggtctttttgtttgtttgcttgtttttgagacagagtcttgctctgttgcccaggctggagtgcagtggtgcaatcttgactcactgcaacctttgcttcccgggttcaagtgattctcctgtctcagcctcctgagtagctgggactacaggcatgtgccaccatgcccagctaatttttttgtatttttaatacagacagggtttcaccatgttagccaggatggtctcgatctcctgaactcgtgatctgcctgggtatttctttgtagcaatgccagaatggcctaacacacctagcccactgtgagcacttcttcaggaaatttctctgaactggatcaggtgaatcacctgtctgcacattttataatctgactctgacttgtagattgccaaatttttctccaagaagtctgttacaatttacagttccaacagtgcctagtttactgtgcccatgcctgcatgtaccccgaaaacattctctctgccagaatgatggttctttcccaatcattcactacccttccatcaccaggtaggcaaatcctgctctttgctaccacagcccctcttcccttccacactctttttaagggacttccatgtcaacaactgacagaaatcagctaatttatgtcatgcaaccatctcctcaaccaggtgagacctcaaaagtagcattttgaaccaaggaatttcaaactatgctgtgtccccttcagctacgaatggtggcctgtgtttttaaagctaattgttccagttcagtgagaataaatggcagtcatgtattctgcaatacagtgatcatcaaaatattactgtaatatcattgctgtcttcacttggacagtggcaagctttcttgagaactgcatatgagggctctcagaattatactttgccttcagcatgtccctggagtacctgcgacaaggtattgcaagttaagaatgagatgaatgctttcacttgacttttttatttaagtcatgcatatatttttgatacgaaggaatggtagctatagaaagttttagtgcatattacatggtttgtctctgtccccacccaaatctcatcttaaattgtagctcccataattcccacgtgttatgggagggacctgatgggaggaaattgaatcatggggggtgggtctttcccatgctgttctcatgatggtgaataagtctcacaagatctgatggctttataaacaggaattcccctccacagcctctcttgcctgccaccatgtaagacatcccttgctcttccaccatgagtgtgaggcctccccaaccatgcggaactgtgactcaagcctctttcctttataaattacccagtctcgagtatgtctttattagtagcatgagaacagactaatacagaatgcataccatattactttttcaagaaatattcagtacctataaaataatgttaggcaccaggaattagagagatgagccaaaaagctagagtttcatggagctagtattggcagttcctaaaaccagatccaggtcgtatgattggccatgaggactcacaggagctgatatacagtgacactcatggctaagacttactacggtgaaagaaaataaaacacaatcatcaaggggaaaagacgcatggggtgaacttggaaagaaaccaggtgcaagcttccaagagtcctttcctactgaagtcacacagatatgcttaattcctccaaaaataaattgcaacaaggcctgtgaaatgctgtctatcagagaagatcagcggagactcggtgcccagggttttcattggggcctggacacataggtacctcctgactagcacataccaaagtttcagacttccagaaaagcaggttttcagtagaaaccatattgtttgcagacagtccaggtactgtatgccattcttatcagaagcaatgtttacagaggcaaatgctttgtttgagaaagtaaaactggatctaaattctgaggcataagtagaaattaactgagggaaaacagaggagagaaaattccacacagtgggaacagttggtgaaaacccttaagtggtaagaagcacggcacatgtatcttagcctcaggcaatgccgctgtgaagtaggcggtggccagatcactcagggcctcttaggctacattgatgattttggtctttcccaaaagcaggaaacaaataaacactgaagggtagtttacagtgggtagtgataagattaggtgagctgtcttaaaattatgaacccgacacagcatggaaaaacatagcaatggatcaagtatagatacaaggagaccacattggaggccactgcaatatttacagggagacatgttggcccggactcggacatgggaggattacttcagcctaggagttttacatcagcctgggcaacatggcaagaccccatatctacaaaaaatagaaaaagtagtggcatgtggtagtgtgcacctgtagtcccagctgttcgggaggctgaggtggaagcctgggggttcaaggctgcagtgagctgagaacgtaccactgcactccagcctgggtgacagagagaaccgtgtctcaaacaacaacaactacaaaaaccaacaccaacccaaaaaccaccataaaaaaagggcaccattactaagttctagccaaactttaattccaacaccatttttttaatcaaatttctaaatttcaaaagtaggtgtttaagccaggcacagtggctcctgccggtcatcccagcactttgtgaggccaagatgggaggatcacttgattccaggagtttgagaccagccttggcaacatagggagacctacatctctacaaaaaataaaataagctaggtgtgatggcgcacctgtagtcccagctacttgaggtggaagaatcacttgagcctggggggtcaatgctgcagtgagctgtggctgcaccactgcactccagcctgggtgacacagcgagactgtgtcttaaaaaaaagttggtattcaatgcagatgtacaagtaactcggtgaaccagagcacagaatgcaggagcagtcaggtccatgtgaaatatcaatcaattgctgtatttccttctgtctttgtatttgatatgtatacatacatatatgtgtgtgtatatatatatattttatatatttacatgtacaaacataaatatatatatatttacacacacacaaatgagggtggtattttggttgactcgaaaaagaatgattgatgtaaaaataacattttcataactggctatccatcttgaagaaatgaacttaaatgtcaaccttatgtcatttacaaaaataaattacagttatactagggataaaacattttttcagaccttgctgatgagaaaaacatttttaatataaatattaaagagccatttagatgactttttgattaatctgagaatggataaggtcttttgaaactacatgaaactaaattttcaaaagggaactaataaatcatttaactatataagaaccttaaacttctttacagttaccattaagaaagtaaaaattaagaagacatacatgcagccaacaaacatatttaaaaatggtcaacatgactacagaaatgaaaatcaaaaccacgagataccacctcaccccagtcagaatggctattattaagaagtcaaaaagcaacaaacgctggcaaggttgtggagaaaaaagaacatttatacactgctggtggaaatataaattagtttagacatcatacaaagcagtgtggtgattcctaaaagaacttaaaacagaactaccattcaacccagcaatcccattattgggtatatacccaaaggaatataaattattctaccataaagacacatgcacacacatgttcactgcagcactactgacaatagaaaagacatgaaatcaaactaaatgcccatcaacagtagactagataaataaaatgtggaacatatacaccatggaatactatacagccataaaatagaatgagatcatatcctctgcagcaacatggaaggagctggaggccattatcctaagcaaagtaatgcaggaacagaaaatcaaatactgcacgttctcacttataagtaggaggtaaatgatgagaacgcttagacacacagagggaacaacagacacagaggcctacttgagagtggatagtgggaggagggagaggatcaggaaaaataaataataggcattaggcttattgcctgagtgacaaaataatctgtacaacaaacccccatgccatgcaattcacctatataacaaacctgcctatgtaccctgaacctaaaatttttaaaaaagtaaagattgagagaaaataattataacacttttgataagtgtttagaagggcttctaaaaacatggtaaaaatgaattaatgagaaaataggcaaaagtatttcctaagcaatttactgatgagaaaatacaaatatagccaatatacatatgaaaaagtgcttatcatgtttacaatgcaggaaactgcaaaataaaatggggcatctttgccacatatcctccatcagatgagcaaaaatatttagtactaatcattcttgggattgaatgtgtgcagaacagcaaaaattgctatgatttcttctcaaatattgtggcaataatatattaacagtttacaacgaagtgtgtgacgctgtgaaatagatatttggtctctgtggcatataactccaaaagcccttagaaactccaccgtgatgtctttttctatgctaatgggttgactagtagctggcagctggcaggtagcttcaggatggggctgcttactggaaagaacaaggaaggattagaggattagacttatagtacttccccctcccccaacctccagtgaggggagaggagctgagggtgaagttgatcactggtgcctacctaatgaaactttcataaaaacctaagaggaccaggttcagagaaattctgggaaggtgacatgcccagagagggcatggaagctccatgccccttaccccatacctttgccccatgcatctcttcatctgtatccttttgtgatatcctttataataaaccagtaaacataagtgtttccctgagttctgtgagctgctctagcaaattaatcaaacccaaagagtgggttgtgggaaccccaacttgcagctggttggtcacaagttctggaagcctaaacttgcaactggtgggagggaggagcagtctcttgtgggacagaaccctcaacctgtgggatctgacactacctccgggcagacagtgtcagaattgaaccgaagggcacccagcaaaactgccacaaaactgattgcttacttgaggagaaacccacacacatttggtcacagaagtcttctgcctgtgattattgttgctgagtgtcagaatacaaacagcacttagagtttcagtagctttttccacactaagtatacccctttgggccagcaatattcagacatttacatcatagaatttaaagattaaagaacaggatgcaaaaatcacatgtgtttgtactgtttgtagtgctaaaactggtagtaatcagaactgaatatcttatggtagtaaaatacacactacatggaaagcatacatgtttccatttccttttttttgagatggagtctcactctgtcgcccaggctggagtgcagtggcatgatctcagctcactgcaacctccgcctcccaggttcaagcgattcttctgccttagcctcccgagtacctgagattacaggtgtgcgccaccatgcccggctaatttttttacttttggtagagacagggtttcaccatgttggccagggtggtcttgaacttctggcctcaggtgatctgcccgccttggcctcccaaagtgctgggattagaggtgtgagccaccatgcccagccccatttcctttttaaaaagaaggtaacatatattttcacatgacaaagatattgatggattcacacctctttgttaatgttgggcatattagcgaggacagttgggggaacctaatttatttcattatagaccttggtatggtctgtcttctactaaatctttattttaaaagttataatgaaatatatataaactagtattattaacatggctgagctacagaggtttaatactatgagtgagtatggcagacaacccaaaaacatctccatgggagtcccacagagtctcacagttgtaaactgcacagaccatcttaacacacaggactcaaaaagctacacccactcaatttttgtgtaggggggagcttgctagaaaaagaattaatcagaaattttttaagtgtaaaaaaaatcgcagctaggattggaagaaaaaaacaacttagagcttagcctaaacagatgaatgaacatccaagaagaaagaactgtaaaacaggacaggattctggaacacagtggaaaatggcaaaaagaaagaagaaagaaaagaaaaagaaaaggaagaaggaaggagagaaagagaaagagaaaataaagtgaaagaataggaaggacagatccagaagttacaccatttatccagtaggcattccaggaagaccaactggattaaataatagtaataattgacatcaggcacaaacagaattaatgcccgagagaacagagcaaggaaaataaagtgtgatccatgaaaatgccacacacccaagcataaacacaacagatgcttctagaaaaaaatgacaagaatgaatttagctcaccagaaggtgaatggagaagccacaatacaaagtcctacacaagacttaatacaagaagaaaatgacacaacctgtactgagtccagaaagtgtgaatgaagaattttaagccctggcaacttgcaatttgaacataaaaccaacattcttttttttttttttgagacagggtctcgctttttcacccaggctggagtagagtggcatgatcttggttcactgcagccttgatttccctgggctcaagcaatcctcccacttcaacccccaagtagctgggactataggaatgcaccaccacacccagctaattttttagtatttttgtagagacaagattttaccatgttgcccaggctggtctcgaactcctgagctcaagtgatccgcatgcctcagcttcccaaagtgctaagattacgagccactgcacctggcccacaacattcttaaacttggaaaaatgcagaggatactatagccaagtctttggcgtgggggaacaaaaagactgcatccaaagtctttgtagatgaaattgaggcaaccaacaaataaattcaagtaagaaagttgtggtaaaaggagaggcggtgagcaatgacttaaatacacagaagtgagtctcaactgggggaacttatggtgacgaatcagaagataacaatgacaataacaatataataacaatcagaagatggtaggaagtaaaaacgtgctaattgcttcaactttcacagcaggaagtaatcaataatatttaaaattaaggtacacagtaaaagaagtgaatcaaatcttcaaaattatttcacaatctcttttcataaaaagaaaggtttagaaaataatgtttcatgtgttgaaaaaacatacttaaaattctgcaatggctatgatttttttcagtttaaaagaaaattaagaaatatgtatatactaaaggatagcctatttccatatccctatattttcatttactttatatcgcttgatagcagcttagaatctagacaaaagaacgaatgaaactacaattcactaattcaatagatgaacatggaatccatatcactatatgtgtgtgtacatatatatgtatatatatttgtagatatgtgtacatatatgtgtatatacacatttggctgttatgaatgatgctgcaattatcattctttgcacatttattctgacttagaaaaaattcttagagtgggaaatgctcgaccagaataaggagaacttctagaaaggcagaaatactcctgcagctgtgtggatgtacccatttctccatatcccagctaacagtgcatgttgacctttcaaatctttggctgtctgctagaataatcataaatcttatttcaatgtgtatcattttgattaatagaggcttatagtcttttcatatgattagtgggcattagtttttctctgctcccttcctgaacaagaatgctcaggtctttatgcataaccctcttctgaaaataaggatattaaaattttgtcatagatgaaacttttctaatatgtttttctttttttaactttgtgcatggtatacttttggtagggtctactacatggagaacattacatctataaatgaataacgttccacagaggagaacaacccaggcagcgatgattcagtatttggagagtcatctctctgctaatctaggcttgggcctctgcgtgaagctattgcggtggcaggaaggcatagcggaaaggtagattatcgaatccaattgacctacctgagttcaaatcctggatcccccattcatttcttcatctctaaaacagaatcatactatctgtctcacatcactattttgtggataaatgcaacgagaaatgtattcacccaatacatttttcgctctttttccttttaccgagaagggacgtatgttttctctctgatgcctaaggtggtatttcgggagagaaaagaaaacaacccacctgagacatgatcttctcctccctatcttgggaaatggctgaggcttgagaatgaagagctgtaggaggagaaagaggccatgaggaggagttggtgctgcctgaagctctagatcatctacctggtaggaaggtgcccagctttacagactggtttcttctcacttgaggaaattcctcaacatccaactttttctcctccacactcagtttggattctccccccacccaccccctctattagctgtcacctcttttctcatgccttgaggtcaaagtctccatggtctcttctgctaggttctctgcgagcagcagcaactgtatttattctctggttttcctaagctggagacgcagaagatccaggcctttttcattccggaaactctccaagctctgacaagttcctgtctccacctttactgtccagagcgcgactgcttcccatggtcaggggacctgtaggttcgggagggaactttacttagtcctttcttctgggccccaaggctgtggttcacatcccctggatactattcattcagtagtttacaggacatttactgagtacttgttaggtttagtcccctactctgaaggggctcatagtccacaaagccaagagtgttgcagatgggtaaggacagtcacagaagagtctgtgaggagggtcctgcagctaaattctcagtaaggcacagggcccctcagaagggcagagagaccccacaaatatatgggacctgtgacctgtgaagaaacacctggagaggaaaagctttattaacgcaatactgtttgacttgcaaaaaataaaatacaataaatccccatacttagggattatagaaatcaggatatagattagagccatctttagtcagcgtttttaactttttttgtgccatggccccccttcactaatctgatgatacctaaagatccctactgagaataaagttttaaatgcataaaatgaaatgcaaagaattatatggaaatacaaccttcaaaactattaaaactctgcatggctcactgtgcaagtatagtgccactttattaatacattcaatataaacaataaatttaactacaatttcaaaagagtaatgagcataaacaatactctgaaatatttgcacaaaccagaatatgacataaaaatatctatgatgtatatggatgacaaagtcacaagtactgctaataatattgtggcttagcacctatgttcacaatgaaatgctacttgtgacttagactagtataatttttttcccattcaaattcatggaactcctgagttatgctcatggagcccagggcaagaattccttttcaaaattaagcctcttctgccccgccccaccccccagactgaattaattactctgggatccagcaacacatggtataaattgctggttaccacctttcacacggcctccatggtcagatctctaagtcatcaaaataattgagtcttctttttctttatttacctttcatggctctggcacacgggaagcacttaagggtcctaagcaattctatcagcaggaggtgatgcacacagattgaacaaaactcttacaatctgctcagagctactcgggaggtagtgcaaagacagtggacatgagtttccacccttccccaccttgcctggcctctttcctcttgaaattcaagtctcaaggtcaagttcagacaaacagatacacatacttgggctgtctactctaggacactcactggattttactgcttcaggaactcaaatctccttctttcctctaaccatctgtaccagccctctgcatggcccacagtgacaagcatctttctctctccctcccttcatgcactgccctgaactggggattgccctttgacccaggtgtggacaaccaggcaacacgctaccctcctacacaaaggacaaagggaagagtagaggccagatctgaaacaaggcctccaccgcaatgccacttaaactcaaacttcaggatcctctaggactgcgctttgcaaacttcagtatgtttaaaaatcaccatgagcaatgatgaaaacagactgctagagtccagctccaaagattctaattctgtatctctgcagtagagcccaggagtctgtgttttaaacgtttccaggggatgctgacaaagtgagtccaggggccacacctgaagcaaacttgctaagttaccctcacttcctctgactggctgattttcagggtttccagagacttccggtgggtaaaaattttccttgtgcttcctcctcctatccctgaactcttcaggtcaggaagcctcaagagtcagcacataaagttctctatcttctttcactcccttggtgaacatatccagcctcaggccttcaacacaatctacacactgatgactccatggcaacctgccatctccactcttatgtctaaaaagcaactcaaaaaacatgttcaaaagaaaagtccagatttgcccctagaggtacttctctcctttgaaatgaagaggaaatattctagtcatccttgatttcttcctcgtactctacatccaatccatcagcaaatacctacaaatcagaaccagaatcagattattcttgctgccaccgtccacaccatcatgtctcacctgcattaacgtgacagccccctaaatggcctctgcattcctactcctgttcgtttcagtctacttcctacacagcagctggagtgatcttttaaaaatataaactcatattcttctctggccaaaaccatcattttactcaaaaccttgcaccaaggtcctttcaatggcccaaagaccttacactatcttccttcccaatattcagtttcccacttatcctccctctttctcattctgctcagctctggcttccttgctgttcttcacatgccctcatcaccgggccttcgtgttgttctctttgcctttttcatcagatgcctgcaggcccctcacctgctttgggtccctattcaagcaccattttctcagtgaaattcatccctcattatccttctcaaattggcaaaccagcacttcctacaccctcctctgcttcatttttctccatgaaactgacaccctacctacagtctatttttcttgttgaccatctttctccacccacaagaatgtgaactctatgagggccagtatttcagttggcacctggcacacagcaggtgctcaataaatatttaaatgggagaacgggagtaacctgaactcagcttgctgatatggatccttgggtcctcttgatgtcatcttcacagcagaagtgattttcttctccagttcatggacttagtaatttgggtgctaaggactatgctggctgtgttgggacccaagagtgaacagggcagacaacgactctgtgctcatgcagctgctaacattctaggtggaaatcagcagccataatgaatatctactgtgttccatgtgcttaggatacatttctggactgcatggagctcacattgggggagaaagagggtgacagaaagagttggtacaaaggcagtgggacaaagaagtaatgggaataagagataattgcagaggtagaaataacaaaactaaaagaataattccatgtagggatgaagaggaggagaaataaatatgattctgaggttgaagtctgaggaaaacaggtaaattatgaagttatgataaaataataagatagcaaaagggaaagcagggttttgaaaattgcagctctagtttctcaaaactggagttatcaaaaggtttaggttcgaattctggttcagccactttgtagttatattaacaccacaggagagacttaaccttttgaatgagtctgtacttctgtcaaataaagataatccttacttgcaaaactaaaataatttaagtttttctctctttcacacacacatgcctatgtgaataaacttcaaagcccagtacgtggtacacagaaaatcatcaatatactattaccattgacccaacccagcattaacctaggaatacaggaactcatgcatttagtaaatgtacattcagtgtctaacaacatcttaggagaataaacactagacatacagcagtaaattaagatggaaaaggtaattgttctcatggtgcttactttcgggtgggttaatctctctacaaattaggtgacctttggttgcaaaaagggctatgaagaaaataaagcaaacatgatagattcctgttttccaacaagaatgtaggtgctatcaggtgaacatatgtggcagctgtggaaagagcaacattaaatcaggtggtcagggacagtctctaagagctgcctgacaaataaatcagctgtgaaaaaagctgggatgagacaagtccagaaggaagcataagcgcaaagacctggtttctgtttagaaggtctcctggccaggtcttacctgttaagtttttttaactttttaaaccttagcaactcatctgtgacatggggataatagctaacatacaaacttgctcagaaaattcaatagaaatacattcatttattcaaatatttattggcaagcctggcactgtcctagacaccatggataaataatacctggcatatagtaagcactcagttaatatacaccatcacagttactctaattatttctaccctgcgtttcttcagcatggcgctgaaacagtgtaagcctttactgacccagtgacacactactaggagccaagaagagaatacactaaataaagacactgggaaattcctcaaacctcccccatttctaggggaaggcaggtgtggctaaggggtctgaatgaacatttgtgatatcaatgggatgaagaatgaggtcaccaagagacctggcattgccacaaaagagaaccaaagttcactcacctggagctctagtgtcaagagatgtggggttatttctccttcttttatacaattatctccgagaaacgaacaattccaagaaggaagcctgtgaaagaaaaatgaacagcaggataacatgatttaatcccaattcccaccacgccacagggggaaatctctcagtgccagctggatgtaatctaccccttcctgtaatctaccctcgctacttgcttcaggagccgaggaaaagaacctctcttcctacaggactcagagtacaagggacacgccattcctgatgcccaaagaaaccgtctacaagcctactttcactgcccctttcaggagacaaggagaatcaagacaaaatctcaagattttaatccagagctgactgtcacatgctgtgggacacttacaagtgaaattctgcctgtgtgtgcttaggcggctacaaaaagcagagccagcaacgatacagcaaaccaactcctaggacttgcacagcgcttaatacatttcaaaggataaaattagaacacagggaatcaacttcctgtttacagaaatgacttcgcagaaaactctgaaattactccacaagtgggtgggcggctaccctgagaaaattcatgtcatcgatccgcaactgacacagtggagtctcccgcactgcagatctcatctcaaagccagagctggcctcaaactgcttttccaagcctggactgcgagggctgccgacccgggcccaccccgcacaggcgctcagaatgttcgatacgtgcgcctccttacacccctgcctcaccaggccgagctcatggaaatccgtgggcttcgaccctccgccgcacgttgtcccttcacactggtcctatagagccgatcctaattcccatggcctgacagtacaaccgcatggagatgcacgtctctaagacgcctcaccactgcctaagaagcaatcaaggtgacgcgcccaccggaaacggaagtagtcgactcgaggtgtgggactacctttcccagaaccctccgcagcgcagtccgatcctaggggcgatggtgtcgtaaatgcgcgtccacctcgagtcacgcccactgcgaggcggcgggaggcggcatgcaaggtgtttctgagttgaaaagaatgtctttactcagtactaacatattcgcgttgtagcaaacctgactatattctcaaacaagcccatcatcccatcaccagggatataaagcattattgattttctggtgtaaaagccaactaaatatttatttcaaaagtagttcatattacatgtaaagaatggtttaaaaaaaattcttacttaatccctggtttatgtgagtaaatatgaattcttaagaatcccatttcccaaatggcatcataatattttgtaatcatttcttgccacaggtcatatatcgtggatagttctgtatgtcacaaaagacgtagagatacatagagataataaaaaaacacaaattatttgcaatacttgcctagcattctttagtttttagggaagttacccctttgtcctgcattgaacttacacttctaattttatgatatcaaaactacacacaatcactttctttaatattttcccaatttgatggactaaatatcctgtcttattttcccaatttgacagagtaaatatgcttattaccgattgcatttcattgtcatcttttattgtcatacactctctgtgtatgaatgatatcgcttctaagtgatgaattgctcccccagtttcaacatttataaagtagtttagaaaaaaaaaaaaacaaaaaacttcatctgacaaggtatatcagtcttttcatttgtggcttcttttttttctccagtatgaccaaaaagacattccttagcctgattcccaataagtgcatatctatattcatttcaggctctttcatttttcttttgaatcaccgcgtgattcatttaagtgtatgatatgaaaggaagatggagtttcctgtttcaccaaaggattgtctacttttcttaacaaaatttacataaatattaattctttcctttctgatttaaacggcatcctaatcacttactacattactatatatataatgaaatattttctgggatacaagtgtgttctgaagatagagattgctttttctgtgccatgatgaaaggtttcagttacagtgataactcatttccttatctctccctccttgttgtgtttcaaaaatttcatcctagaagttctagaactctctcttataaacagattatcgaattgttttgataaattctaaaaaattgccaattgactccaaagcatccaagcccttcagatatttggttccaaacccacccctctttgcttgggtagacacagtcctacttcccatcctgtgtcctccagttttacaaatgtctgaatttgctgctattgttcttccctctgtaagtccatcctttcctgtactattaaaatcttactccatatttaagacacaacttgaatataatttcctctatcgagtgtttttgaactctatatcataattcaatgaacagatcagtctgtgattgggagaatttcatgcgagtgtagtggatgttaaataccactctcagaacattctcatttccccgagaaatcaataaattatattactctgggatccagcaacacatggtttaaattgctggttaccacctttcacatggcctccatggtcagatctctaagtcatcaaaataattgactcttctttttctttattttctttatttacctttcatggctctggcacatgggaagcacttaagcaattcaatcaagtgtcttggccgggc[137 bp omitted]attagccgggcatggtggggggtgcctgtagtcacagctagtcaggaggctgaggcaggagaatagtatgaacccgggagaaggagcttgcagtgagccgagatcaaaccactgcactctagcctgggcgacagcgcaagactccatctcaaaaaataataataataaaataaacataaaaataattattttaaaaaggtgtcttgacctggaagctaagagccaacctgcacaaagtgtgggtagatgaatccattccaaggcccaaggtaaatattcagccttcatcctacctcatacaaactgcaaaacactgtagaaaccgtgtgtcaactgaatttgaaactgctgtaatttccgactccctaacagttttgttattgttaagaaaaaataacccaattttaagtaggcaaggtatttccgtagacatatcttaaacgaaaataaacaaataggcaagagacacatgaaatgactctccacatcctcagtcattagggaaatggaagtcaaaacaatggtgctacttcacactcactagaatggtcaggattgaaaagcagaaaataggctgggcacagtggctcacgcctgcatcccagaactttgggaggctgaggtgggcggatcacctgaggtctggagttcgagaccagtctagctaacatggtaaagccccttttctactaaaaatacaaaaaattagctgggtgtggtagcatgcatccgtaatcccagctattcgggaggcagaggttgcagtgagccgagatcgcaccaccgcactccagcttgggcaacaagagtgaaactaaatcacacacacacacaaaaaaaaaacagaaaataaaaaatgctgacgatcatgtaaagaagctgtaacattccggcactgctggtaggaatttcaaaatctacagccatattggaaaataatctggaagatcctcaacatgttaaacatcatagaagtctccaaatgatgcagcaattccacacctaggtatgaaccaagagaaaacatttgtccaaactaaatattgtacaggagtgttcatagcagcattattcaaagaagtagaaatccatcaccttaaacgggtgaatcttatccagggcatccacgtggagacaggggcagacacagggaaagagaatgaggaaatgtctgaaatggaggccgaaagagagacaatgagaaggcctgtgaatggaagaaaccgagcgcagggaaaacagtcatacgtatacatcagagatctgagaacgcgggatcataccgacagtgtcactgccaggaaagggggtcaagctagggatgtccccggtggcgtcgcccgcagaaacacggacaggtttggggttcacgctggcacgggcgccagcagccacgtcagcaggcaggagggtcccactgcacagctgaggggtgatgatagcccaggtggtgatgtcggccatcagaggggcctctcctgccagcaaatgtgtgacagtagcaagtaaaaggacaggtctttgtgtgaggccggaatgcgggaagggctcttctgtggctgagtgtggagtcctcagcaggaatgtggataaatggccaggtaactgcatcacgttggctaggaggatggcaaggacttcgagctgaatgatgataacggggagtgactgtgagaccctgcgaggctctgagtgtaaaagaagatgggtgcggggccccaggggagtatgtgggagccactgctgtgtagatggaggtcgttggggaagaatctggtgagctctgtgaatttccaggggtctcctgtgtgctgggggctgactcttgcagaaaactggggatggttggagagtagctgggagacaggaaagagaccctaaggaatggcggtacaaaggtcagagaggagcaggaggagcacggtgaggtctgtgagtttccaggtgagtcctgtgtgttaggggctggccccaggagaaatctggggattgttggagaggagcagggggatgctggagagtctctgagggatggggatgcagagatgggagacagaggtgaggagcacagggaggtctgtgggttgctaggtgatgccctgagcatgagaggctgactccaagagaaatctgcagatggctggaggggagctgggagacacaggagagcatctgagggctgcagatgagcaaatgggagacatgattaaggagggcaccgacatttgtgagattctcggtgacccccaggtgtggggggctgtgtgttgcagaaaccttgggataatgggagagtagctgggacacacacacaagtagccaagggcctggagtacagagttgggagacatggggatggagccccgtgaggacgctgagtttccaggtgtttctttggtatgggaggctaactagctgagaaaggtggggaggtctgaagagtaactgggaaacgtgggactgtccctagggggtgggggtgaagacatgggacacataggggaggagtgcagtaggaactgtgaatttctgagtgttgcctcggtgtgtcggtttgactgttgtagaaacctggggctggttggagtggagctgggggaaaccagagagtctctgggggatgagtatgaagagatggaacacattggggaggagcacagggaggtcactgagtttctaagtgattgctgcgggagagaggcagaccccgatagatatctggcaatgctgggagagtagctgggacagacaggagagacgctgagggctggtgaggacatgagacagactggggagtaactcagtgaaagtggtgagtttggtgcagatttatgggtgcctggaactgattcccgcggaaatctgggcatggttgaagagtagctgtcacagacagaagagtccctgagggtttaagaattacccgtgtaagtgaaaagacttttaagaaagagtggagatatgcgttgcataaatattcttttgctctagaaccacgtagagacatgggagccagttgggtggagcattcattggatgtgcttggcttaggaatatcaaggaatatcaaggtgtggctccagataattcaatcatctaattaagttttcagttatgctaatctgttttaaaattctgtttgtgtaaattcttttactcagactgagaatggcaatgcctcaactccaatttccagggagggttgaaagcctcaggttgagctgatcaccaatcgcctatggtttcacccatcatgcctatagaatgaggtctccataaaaacccaaaaggactgggtttagagagcttctggataaaacttcccgaaaagtagtgcgcccctccccacatgccgggcccaaaatccgttttctgaattttttgcaatatccgctatcatacaatggtaaatggaagtgtttccctgcgtgctgtgagcacttccagcaaattcatgcaactaaatcagggagtggtggaaacctgatttatagccagttgctaggaagcacaggtaaaacaacgtagggcttcccactgttcttagagtgggaggccagtcttgcgggactgagccctttggaatctaatgctatgtcccggtagatagcgtcatcattgaattagaagacacatgtatgttgagaataatttttctagtcatttgctgtatgtcttatttacaatatgtaatcaaattctttgtcctgactttatggcacctggattgggaaccatgatttgaaccaaaaggtggtctgtcactttctcagtttgaaactttattttgccgctagcgttttgctattcttttttcgttttgttttgtttcgttttgttttcaagttctggggtatatgtgcaggatgcgcagatttgttacaaaggtaaacgtgtgccgtggtggtttgctgcacctgtcgacacgtcacctaggtattaagcccagccatgcaaaagctatttcccttaatgctctccctcccccaaccccaccccatgacaggccccaatgtgtgttgttccccttcctgtgtccatgtgttctcatttttcagctcccattataagtgagaatgtgctggttggtgttgtgttcctggattagtttgctgaggacaatgacttcacatcactagtgttttgtttctattttaaagactagtattttattgaataagatttattcacagaaaaataagctttaatctacaatgaatgccagagtgtacagcagaaagcaattttctcagttttccacacacaagggttcctagtaagtgaaaaaagccataaaatctcattcacaaatgtactactctgtctcaaaacatttcacataattatgcacaacactaatacaattacatctgttactcagtcaggttaaagtatccctctaataactgatttttaaaatgctctcaatatccactccctatcagtctgccattgttaatggtgtacagcgttattgaatacaatggaatccatgaagcccatatccacggacaaaccgtgacttatgatggtttgatttatgatttttcaactttgtgatgggtttattgggacattagatgcatttctgagttacactggctttatcagtatgtgaccctatactccagaaatagctgtataaaggaaaacaggtgtacctaattaaattatactcagtgacttgagagaaaccaatagatgtttacaattgatggagaaccgtgaaagagagataccagtaaataaaaacaataacacaattttcctgcaactgtcgaggatttcccaaaaaaacacagaaagtaggatgcaccgaaggcatatgaaagagagacggcagaaggagtaagagagaaataggaggaaggaaggaaggaaggaaggagaaaacacctggtgttactaaaaccaaaaaaagaaaaaatggtttcccactctgggtaatggtacaatgtggatgaaccttgaaaatactgtgctaagtgtaaagtcagtcataaaagctcccatattgtataattctgttgataggaaaagtccagaatatgcaaatctatggatatagggttgagcgctctatgtaattgttacctagggctgaggatcggcgagatggtttgagacagaatgaggagtgactcacgtttaccgggtttttctctggtcgggggtgataaaatgttctcaaatggattgcgaattaaaattgaacgtgcacaaccacaagtatactaaaagccactcaattcatgacttttaatgggggaatcttatgtggcgcactctcgtcgagaccacggcagacatagtgaaagagaaaaaggtgagtaaatatctcaaatggaggcagaaacagagagaatgaaaagccctgtgaatggaagcgagagagaaaagggaaaatggtcctatttacaaatgacagatctgaaactggggctcacatcaacagtgtcactgccagggaggaggatcatgctggccatgtcaccggtagtgtcgcccgcagggacgccgacatgctggaggttggtgtcagcatgggctctggcagccacgtgggccagcaggagggtcccgctgcacagctgtggggtgaggatagcctgggcggtgatatcggccattagaggggcctcttctgctggcaagagtgtgacagtagcaagcagatggacaggcctgtgtgtgaggacggaatgcaggaggggctcttctgcggctgggtgtggggcgctcaccaggaatgtggagaaatggccaggtaactgcgtcatgttggctagtagattggccagggcttcgaactgaaggacaataacggggagtagctgtcaggccctgggagtgtctgagtgtaagtggagatgggtttggggtcactgagggatacgtgggagccacccctgtatagatacaggtcatagggaaatagtctcgtgaggcctgtgagtgtctagggttctcctgggtgcctggggctgacagcggcagaaatccggggaaggccagagagaagctgggagacacaggagagtccctgaaggctgggggtgaagaggtgaaagaaatgggggagggtggcagtaaggtccgtaagtttgtaggtgattcctgggtgtgggaagctgactccagctgaaatctggagatggttggagagtagctgagagagacagaagagcccctgagggctgggggtgaaaacatgagtgagactggggagtaactgagtgaaattggtgagtttgctggtgtgtcctgggtgcctggaactgactccagctggaatctagagaagttttgagagtagctgaaagagacacaagagtccctgtgggctgacggcaaagacctgagagggaacgcggaggatctcagtgaggtctgtgggtctgtaggtgattcctaagtgtaggagtctgacgcccgctgaaatctgggcatggctggagagtagcggggacagacgggagagtcccagggggctgggggtgaagatatgagagagactggggagtaactcagtgaaactggtgagtttgtaggtgattcctgggtgcctggaactgactctcgctgaaatctgggcgtggttggagagtagctgggacacacaggagagtccctgagggctgggggtgaagacacaaaagagactggggagtaactcagtgaaactggtgagtttggtggtgattccggagtgcccggaactgactccagctgaaatctgggcgtggttggagagtagctgggacagacaggagagtccctgagggctggtgaagacgtgagagagactggagagtaattgagggaaactggtgagtttggtggtgatttctgggtgcctggaactgactcccgctgaaatgtgggcgtggttggagagtagctggggcacacaggagagtccctaagggctggtgaagacatgagagagactgggaagtaatgcagtgaaattggtgagtttggtggtgatttctgggtacctggaactgactcccgctgaaatgtgggcgtggttggacagtagctgggacagacaggagagtccctgaggcttggggataaagacgtgctagagactgcggactaactcagtgaaagtggtgagcttggtggtgatccctgggttcctggaagtgactcccgctgaaatgtgggcgtggttggagagtagctgggacagacaggagagtccgtaagggctgggggtgaagacatgagagagactggcgaggatctcactgaggtctgtgagtttgtaggtgtttctggggtgcgggacaccgactcccgctgaaatctggacgtagttggagagtagctgggacagacaggagagtcatggatggctgggagtgagctgctggatgatggcagtaagaacatatggtatattattgatgaatgaggtgactgtgaagaatctccagaggaggacacgggagagcacaatgacatcagtgattgtcctgcttggtcaggaaagggaaatgtaaagttgtgaaattctgttgatggtggatgtgagagtggtgaagccctgcggcatgatgtagagtacttccacatccctggtgaggagctgccccttgggtctgagtttctgggaggggagagggagaagaagctgggtgaggcaggcatgaatcttgaggagtcagggctgggggaccgctcataatctcccgagacctgtgagtttctgggggactcctgggtgcatggggcggactctcgcagaaacctggggatggttggagagtaactgggagacacaggagagtccctgaggcctgggggtgaagagatgaaagacacaggggaggagcaccgtgaggctcgtgagtttgtaggtgattcctgggtgtggggggctgactccagctgaaatctggggttgtttggggagtagctgggagacacgggagactccccgagagctgcgggtgagctgctgggtgatggcagtaagaacatgtggtatattattgatgaacgtggtgattctaaagaatccccagaggaggacgcgggagaacccaatggcttcattgattgcccatcacggtgaggaaagggaaatgggagcttgtgggattctggtgatgacagaggtgagtgtggtgaagccctggagggtggtgaattgtagctccggatccctggtgaggagcttcctcttaagtctgagtttctgagaggagagagggagaagctgggtgaggctagcatggatcttggggagtccgggctgggggacggttcataagaagagccagacaagaccctactgttcttaggtgcagacatgattaggaaacctgcagctcccaaggacccctaccaatttcctaacccgcagaatgaaggagtgtgtgtgtgtgtgtgtgtgtgtgtgtgtgtgtgtgtgtggtgtgaggtatgtgctccttgagaaaatggaaataaaccaaccaatgagacagacagacagacagagattcacttacccaagtgttctgtcctgtcctctgaatccgcttccaagtcgcaagacgctgtaagctccaagtccacgcagagcccgcaaaacgctccggccgctgctccgctctgtgaagatctgagtacaggcccgccagggtgggtttaaatagcctcgggcgggcgcagcctggcagcggaaagggcggagcttcactcctcctttccatcagtcacccccaactttcccaggctacaccgcgtaggaaactgctctcctgatttgatttcatgcgccacatttgggacaatctaagaacttacgagtttttttggccaaatatattacgaattacatgcactgaaacactgaaaaccatctagtggttctgtggttctcacattgtggttttgacaccagcagcatccttgcaaccctcaaaccccggagatccacagatctgtgttgtaacaagccctccccctgaccctgatgcatggcagtttaagaattacccgtgtaagtgaaaagacttttaagaaagagtggagatatgcgttgtataaacattcttttgctctggaaccacgtagagacttgagagccagttgggtggagcattcattggatgagggtgcttggcttaggaatatcaaaggtgtggctccagataattcaatcatctaattaagttttcagttatgctaatctgttgtaaaattccgtttgtgtaaattcttttactcagactgagaatggcaatgcctcaacctcaatttccagggagggttgagagcctcaggttgagttgatcaccaatcgcctatggtttcacccatcatgcctatagaatgaggtctccataaaaacccaaaaggactgggtttagagagcttctggataaaacttcccggaaggtagtgcacccctccccacatgccgggcccaaaatctgttttctgaattttttgcaatatccgctatcatacaatggtaaatggaagtgtttccctgcgtgctgtgagctcttccagcaaattcatgcaactaaatcagggagtggtggaaacctgatttatagctatttggtgagaagcgaggtaaaaaaaacatagggcttcccattgttattagagtgggaggccagtctgcggaactgagccctgtggaatctaatgctatgtccaggtagatagtgacataatggaattagaagacacccagctggtgtccacagcagaatggattgtgtgcttgactgactgaaagaaatccccagacatgtcctcacagaaatcttctgtgctgattgttgtgatgtgagaacggaggaaaaacagtttttgtttttttcactcagcctaaaatgtaaacgtgtccagtttctcacgctattgaggatcacgtgatttataataaaaatgtttaatatttgtcaaatttatgtataaaaaggatgttggttttcattttattgctaacaatcaaggtggtcatcgttgatgccttttcatcatttttcttttcactgcgttatgtctttcaccc[184 bp omitted]ccgggcgtggtggcaggtgcctgtagtcccagctactggggaggc[144 bp omitted]aactccattctcacctcacatgctgtgagccagggagtagggactttgaggattataaagcatatgagcaaatgtaagttgttaaattacactcaacaaatttgaagtttgaacgctctatgtatatttgataaaattagagatttagtgttaattattttaggtgtaatagcagcatttattacatttctgatcgtgtttctgggcaattgcagttccagattcagctgcacttttcctctaggtcttcattccctgaagaggttgatatgggcatctggtctcattcctgatgcattcctcagatcagagtagttgtcagggtgagggatgagaaaggcatttgtgtgagagagctgtgtggactttggcagatagggaaaaaacaagagtcttgaggtgccatgtgtcccatgcctttggctccccgccttttccaccctgctgtctgccctgaaaggccgccattgccttctggccttgcttgtctttggccaatgggaagtctcaacaggaaagtttggagagaggaagaagtgtgagttggagtatcttgtcccccagttctctctctgcaggattgtcacagattagctgcccttctaaacaacaggtcatagtttaggcggccctggccacacagtcctcttagttccaggctccagggactgctccctccccttacctcttaaggcccaggtgttataatggcacctccctgtcacttcccaggacagagccttatccactgtgacttccttacccccagccaacaccattgtaagccgtctgtttattaaactcccctcaaatttcaatgtgccatctggttcgtgccacggccctgacttgatacaggcaggtagtgtctgaagccagaaattcaggaaaccaaacccccaaccatatatatgtgagtgcatgtgtgtagatgtgtgcttcaaaataaacctgtcccattattggctcttcagtgagaacaggtactggaagtagagggtgagtttatgtctttgcacgtgcatctaatgtataatatccaagccaattctatttgtgcatttgttaatattgagaaacattgattgagtgcttgttaaatgataagatccttaccaagtacagtggataaaagactacagcttggttattttttttttttttaggatttgtagttttttgacaggggaaaggaggagtgttttcttggtaggttttaactattgtaaaatgatgtaattcatgctgtactaatgagttgaacactccttattttggcctttgttggagcccaaaataagaagtgattaatgatgtctcttaaaggtaggaaaggagagaaaaagagtccaaggatttaccaaaaagacatttcatattctattaacctgattctataaccctgtgagctgcaattcaaagggtagcccacagaccagtgccaataaatgatattggtctgtgaccagataatttgagaacttgagtgtagatgtttaaaattttgtcttattgattaacataataataacaatcaggctttaatttgcttaccttcttaattttctttttccagtaatttcttgttactgtatcttaccaaaatatcagtctgtgacagactgaaagtaaccgtaataataatttaaaaactagtcctttatcacagttagtgtgagaagcactatctgagaagacagaaactggttttggccttttattttttaatcttcggagtttccacagtgcctaaagtggcaattttatacagtaagtttctccacgaaggccagaggcaattgtgtttacagagtttatcagatggaatcccaagaaaaaataaacagaacactcaaattgggtaatttgagaagagcttaataaagggacagtctataaagtcgtaggcaggctgtggtaatcaacaaaggatactgcaatatttcagagctagtgatagcagggtaaattactggctttaggactgaagggctaagggaggaggcagtcactaaaacctgaagaaagatttatgggatgacagctgcctgatggaggccatgacctttggtcaatggatatggaatatagccattccacagcaacctctagggaaaaacctgggggaataaatattctgacttcactcttgtcccttccctggatctcttgctggctttccccattggctgaacccaactggaagctaattggcaagggaatccactgatataagcagaacaggaaggggctttagtgtatatgaagtggcaagcttagaaggtctctgtctacccactttggtctacctgcagtctgaggatatttatagctcagtatactgtgagcatttgcagagcagagaatgtgtcttatatgtcataggtgtgtcatcaatacttgcaaaagcaggggatagaatgggtgctggagagagagtttaggaagacaagagtcaaggtgtagatgtttaaaaatttgtattattgattaacataataataaaaatcgggatttaatttgtatgtcttggctaactacaagtccttcagaccacaggcctggccatacaagattaagtcttgcaaatgaaagtggaaatagcagaaggtcgctgtcatcctgagattgctctcttttttttttttttttgagacaaagtgtctctctgttgcccaggctggagtgtagtgatgcaatcacggctcactgcagcctccgcctcccaggtgcaagtgattgtcctgtctcagcctcctgggtagctgggattacaggtgcccgccaccatgcccagctaattttgtatttttagtagagacagggtttcaccatgttgtccaggctggtctcaaattcctggcctcaagtgatccacccgtctggggttcccaaagtgctgggatcacaggtgtgagccactgtgcctagccctgagattgctctcttaatcagcaattccagagcctcttttccagcggaattcagatgtagactatgtcagttcattcacaagtctgagaaatggaaaacaatgtgcaggttttgacccaaaagcttgaggagagagacaggagttacacagtggtctgagattgagggactgggttcgaatcgagggaagtcttgaggaggtgggagttcagtctgttcagagtgagaagagatgatatctagggagaggagaaagtgtgagaaacttgtacagataaggaaggaaccaatgttcattcacaacttgttggatccatgatctcatggattctttcttctttgcagttctgcttttccagaattctgccctttccaaaaggaagacggtatgattaagttccaggtaagttaagggtttctttcactttaaatatactgttcattctgaggaacgagacacttctgttttctgaaagaaggtcagcattttttgagtgactactatgtattaggtactttatctgctcataatgactttgtgaggcaggtgatatgactccctttatagaagtgaagaaacaaactcacagatttcaagatgtctactttggtgctactctaagtgtagttcatgtatcagtaccagtccatgaactccttgtcactgccccatgagggaaaaagaatcaaaagtaagttcagaaacttttatagcaatttggtgttgccgcagcatccgagtgcatgggcagcatatacatgaccatactctaaatgtcactggtctacttcgataagtagcaagatttgaatgggtatgtattggtcagagttcaaccagcaagacagaccaataggagatatattttaaaagatttattgtaaggaattggcttatatgattatgggggctaactaggcaagtccaaaatccatagggcagcccctcaggaagggtgggctggaactcctggacacagactgaagctactgtctgtgggtggaatttctccccctcccagggaagcctcagttctgctcataagacctttcagtttattgaatcagacatactcagattagttagaataatctcccttaaagtcaactgattatggactttaatcacatctacaaattatcttcatagcaatacctagattagtgtttgattcaataactgaggactgtagcttagccaaattgacacattaaaaagaccatcacagtgtggcagaaggattttcttttaatcatgaaaaatttaatgatgaaaatacacaaaaaagggcaaagggtcttatgatcctccatttgcagtacccatcatgcagtttcaacaattaactttttgccaaagagatttgcttaatctctgtttcagtatttttctttcccaaagtatttgaaagaggcatggtattttacactgtattggtttttctctgagcatatcacttttgtatagtaccttattatatatgcaactaaaatgaatgagctcacacttttatccttctgcctggaaaccatcttgcccaagtccaagattcattaggtacattttctatcttctaaattacagcaacagttcaccaaatgttcaccactgcatcacccaggtcaccatttttccagcctcctgtaacagtgtcctcaatggttttggcctggacctaaagccaatgccatgaatatttggtagcactctgctggttttggttagcttgggtatgtcctcatagcaaagacagaggggcaagagagcaagtgggcatgtgagatttctcaaggcccaggcttagaactggcacattatcacttttgcttcattttggtagccagagcaggttacattgccaagtcaaaactaaagaggtaaggaaacacactctggtcctttagtgagattggagagcatggaagaggatatttctaaatagcaatctaatttaacacactctctatgtatttcagtatatatttccttaaaaatggactaatgagataatcaataattatttggtattatctaatacccagacaataatcaaatttccctgattatctcaaaaaaattttgacagttgctttgttcaaatgggatcttaaaaaggtctatactatcatatagttggttgttgtatctcataatgtcttttaatctagagaaatctgcccatctactttattctctcctgctgttgacttgtcgtagaaaccaagtttggtgtcctgtgttctttcctacatttggaatgcatttgtttgcttccttttggtgtctttcagtgtgttactctatccacagtattttttgtaagtggaagcaccagatgcttgaatagattcaggttcaaggttttacaagaatatttcatagatggttttacaagaatacttcacaaaggaaaagatttaaagatgttttgcatgtatttattggtttataaatttggtttcttaatatttgggggctgtccttgtacctgcatcctatggcattccctgcctaggattcctaccaccccaagtaggcttcagggtatctgtatttcctgaatgattaattccaattcaattttgttgcctcccacagaagaaggatacagtagtgttactgacagagcagtgctattaggacaactgtgctgactcccctagattttgtttttaatcattgtcagattttggtaattggacaattgttagtaacatattctttttgaagtcctttataactgcttacaactttcgtttgaaagctctgctttatttagagatgcagaatctattgagagaacatatctgtaaatactcgactctgagcagtgtgacatatgcagtgatagaaatattttatgtaaaaattggtgtcttgattaggagatggttattaatatcagattattccccgcatccttttattttaagaaatttcaatttatcgagaaaatgaaagaatagcataatgtgtaatcttcacctagattcaccaattgttaacaatcaccacaaacatatgcataatatgtgtatatacacacacatatctatattttattttgatgacccagttgggataaattgcagacatcattataattcatccctaaatatgtcagtttatatctcctaagaataagagcattttcctacatttccacattactgctaacatactcaggaaatttcacattgataccattattttttaatagttgatatccaaatgttctaaattatcctaataatctccctcttcccttttctgttttttgaatctaggagccaatgctttaagttaccctgtcttcttactttcctttaacatgataaaaatagattaatctgccatgaaaaagtgaaaataccaaaccttggtgtgtgatgggaaatgaactcatgaaacactactggacttatgtatcagcacaacaccttagtatagatttatctgcgcctgtgtcctgggccatattttataatttgattaatattgtcctttgggaatccctgattcaataggattagtatccttatgaaaagagactcaacagagcttgctctcattctccctctgccatgtaaggacacagtgagaggacagctgtctacaagccaagagaagaaacctgaatgaaacctatcttggtggtacttgatcttagactttccaatctccagaactgtgagaaataagtttcttttgtttgtttaatctaacccagactatggtattttattaaggcagcccaaacagactaagaccagtcatttgtgtggatgattgatgtggcatgtggttgatgttttaggaaagggtgatattcaaggacgtggctgttgtcctcaccaaggaagagctggcactattggataaagcccagataaacctgtaccaagatgtgatgttggaaaacttcaggaacctcatgtcagtgagtgagtaactgagcatcagaccactggacctgtttcctcaaatcatcatttcaagccagatagaatattccagttagaccacaaagagaaactttgaccactggagagaaaaatcctaagagctgcatgcacaagttaggaccctgcagttaatgagcttttacagatcattgtgaggatgtggctccttgtgatgggtttgtgagggagctctccccaaatcttccacccctggcctgtgggcattcattgcaggaagtaagcccttcctcccctactcacatatttaggctctcattctttcctcatatttctcagaatgagactgataaaattcacacaccaccaaggaccttgatctatttgttgcttctggagaaaagtcaatgtttatccaatgttctggataaaccagtgttaatggaatcatgggagaactttgattttgttggaagttacaacagccaacacttatgggtatatagtaagtgtaatctaagtgttggcttatttgattactttttgataaatatccaacctcattttcatttctcaaagtttcatgtacagttaggtattacctaagtttagtttataagatagtgatatggtttggctgtgtccctaccaaagtctcatcttgaactgtagttcccataattcccataggttgtgggaggggcctggtaggaggtaactgaatcatggaggggggtctttctcgtgctgttctcatgatagtgaataagtctcatgagatctgatggttttataaatgggtgttctgcacaagatttctctttgcctgccaccatgtaaaacgtccctttgctcttcctttgccttccaccatgattgtgaggcctccccagccatatggaactgtaagtcaattaagcctctttcatttataaattacccaatctcaggtatgtctttattagcaacgtgagaacagactaatacagatagttgatgttattatcccccttttatggatgtattactctgttttcacactgctgataaagacatatccaagactgggcaatttacaaaatatgaaggtttaacggacttacagttccacgtggctggagatgactcacaatgatagcggaggtgaaaggcacgtctcacatggtggcagacaagagaagagagcttgtgcagggaaactcccctttctaaaaccatcagatctcatgagactcattcactgtcatgagaacaacacaggaaagacccacccccataattcagtcacttcccactgggttccacccatgacacatgggaattgtgggagttacaattcaagatgagatttgggtggagacacagccaaaccatatcatccgccccagaccctcccaaatctcatgccctcacatttcaaaaccaatcatgcctcccaacagtcccccaaagttttaactcagttcagcattaactcaaaagtccacagtccagtgtctcaactgagacaagccaagtctcttccacctatgaacctgtaaaatcaaaagcaaggtagttacttcctagctacagtgcaggtacaggcattgtgtaaatacagctgttccaaatgggagaaattggccaaaacaaatgggctacaggccccatgcaagtctgaaatccagcagggcagtcaaatcttaaagctcaaaaatgatctcctttgactccatgtcttgcatcctgatcacgctgatgttgggtttccatggtcttgggcggctccgcccctgtggctctgcagagtataacctcccttctggctgctttcatgggctgctgttgagtgtctgtggcttttccaggcacatggtgcaagctgtcggtggatctagcattctggggtctgaaggacagtggccctcttctcacagctccactaggcagtgccctggtaggcactgtgtgtgggggctctgacatgtgggaattatgagacacaacatataggaattatgggagttacaattcgagaagagatttgggtagggacacagccaagccatatcaatggatgaaacaactgagtcacagaattaataacttgcccacaatcacacagcttataagaagaactaggatttgaaccctcctaatctggtcctaggtcctgtgattttaataaataacctcatgaaaccaaagcgtaaactgtagacacaggaccttttgcataaatctgcatatctctgcagttgtttctcaaactgcaggataaaaccctcttggtgagtcctgaaatcaaattactgtgtcataactagcaatttttaaaaagcaaaatagattaatagaacagaaaacaaaagaatttatcaaagtacattgcacacagtatgtaactatcagctgagcaagttttagtgagcagtctgtgttgatgtttgtgcctattcctactgagtcacaatgctgattttactgtgggttacaatcaaaacaattgggaaaccactgcttaaaccctattcagggcagctcgtggtctccctttccctgatactatcttataaactaaagtcactttcaataaaacaacccagaaaggaccttgaaccagaagcagtatccagtgggacttgaccatgatattcatgccattttgaaacccatcttaggatcccaagaatatgatcgtcctcttctgcctcagccccctgtttgttatataccacagtcttgcttccctgggtgccaggccattgacagtgccacagtatctgttccccattttcatagtcatggctgtttgagattctgcaacaacttaaaagggcagaacttaaggaaatggattgtaggatctgagtggtctctatcttttcatgaagacaaagaaccttggggaaaataaaaaggatgtctcttaaagcttgtctcagaggtttacatacgcatccccgcacaacgccaggaccatatttcacaatgtttaccccatttcaatccccattgcctttttatccccatcccctttaggctcaccatgtacagttgtgcaggttgtacacaaacatacatgatagtcctccatatgacagtgatgtgaaggaagggaagccatcaggagataggacttgttgcttgtttctgaaacctcttgtgaccctttgtgtcccttactctgcccaacatataaaaaacactccatcaatatgtattatttatatacacacacacactacataaaatgggagcctttcccataccttttgtagcaagattattaaaggctttttatcgactactcttatagcagggaggtgaatttcttccttcataaatttttcctaagatttccttttttttcttttttgcagagtaggggtggaaaggtcttgctctgtcacccaggctggaatgcagtggcacaatcttggctcactgcaacctctgcctcccaggattaagcaatcctccaacctcagatttccaagtggctgggatcataggcaaaactgagccaatttttaatttttttgtagagatgggatctcatcatattgcccagcctggtcttgatctcctgggcttgagtgatcctcccacctcagcctctcaaagtgttgctattacaggcatgagccactgcacctggccaagatttcttttaatttccctacaacacttgatttccaattggcagctcacaggttagaattaccgtggctctaattgtttcatatgtcaatagaagccagggacaacttcccaccccatcatatttcgttttctcaaaacctctggacagatgattgacttggtctcttagccacattctctttcttctcataagagatgggattaaaaacaacattttgaatcttcaggaaaaggggttgaattaccttttacaagaagtgcttcattgctggcagatttcgaaacaaaggatccaggatttaactgggagtcaggattatatcatgaaccttcaagaagagtgttccccacatttaaaaatgtttccctctgtgaagagtgagcaggcaagtctcttcagatttctgaaaatgaaaactatgtagcaaatgtcattatcaaaaatcaggatatcacagcatggcaaagcctgacacaggttcttaccccagaatcgtggaggaaagccaacataatgaccgagccccagaactctcagggaagatataagggaatttacatggaagagaaattgtacagacgtgctcagcatgatgacagcctcaactggacctcacatgatcatcatgagtcccaagaatgtaaaggagaggaccctggtagacatcccaactgcaggaaaaactttggtatgaaatcaacagttgaacaacataatgcagtccatgtattaccacagcctttcacatgtaataactgtggggtgccctttgcagatgatacagatcctcatgtccatcacagcactcacctaggagaaaaatcttataaatgtgaccagtatggaaagaactttagtcagagccaagatcttatcgttcattgtaaaactcactctggcgagactccctatgaattccacgaatggcctatgggctgcaaacagagctcagaccttcccagatatcagaaagtcccttcaggaaacaaaccctacaaatgtaaagaatgtggcaagggcttcaggtgcaactccttcctttataaccatcatggagtccacacaagggagatgccctacaaatgtgatgcatgtgggaaagggtttggatttaggtcacttctttgtattcatcagggagtacacacagggaaaagccctataaaagtgaagagtgtgggaagggctttgatcagagctccaaccttcttgtccatcagagagtccacgctggagagaagccctacaaatgcagtgagtgtggcaagtgctttagttcaagctccgttcttcaagtccactggaggtttcacacaggggagaaaccttataggtgtgatgagtgtggaaagggcttcagccaaagtacacaccttcacattcaccagagagtccacacaggggagaaaccatacaaatgcaatgtgtgtggaaaggattttgtgtatagctctgttcttcacactcatctgagttcacactcgagaaaaaccatataaatgcaaagtgtgtggaaagtgctttagttacagttcatattttcacttacatcaaagagatcacaccagagagaaaccatataaatgtgatgagtgtggtaaagacttcagtcggaattcagatcttcgtgttcacctcagagtccacacaggagagaggccctataagtgtaaggcatgtggtaagggcttcagtcgtaattcatacctccttgcccatcagagagtgcatatagatgagacacagtacacacattgtgagcgtggcaaggaccttctgactcatcaaagactacataagcagagagaaacattataaaggtagtaagtcagggttcaattaggaaaacagaagccacactgtattccagatgatagaggctaactcagcctttgggagggctgggggagcaaaagacagggacgctgccatcgatgaggtcagcatgacaggctgggggttcgcgctggcacaggcgccggcagccacatcggcaggcaggagggtcccgctgcacagctgaggggtgatgattgcctgggtggtgatgtcggccattagacgcgcctcttctgccggcaagtgtgtggcagtatgaagtagaaggacaagcctgtatttgaggctggaatgcggaaggggctcttctgcggctaggtgtgggaccctgagcaggaatgtggagaaatgggcaggtaaatgcatcacgttggccaggagatttgcaaggacttacagctgaatgatgataatggggagtgactgtgaggccctgggagtctctgagtgtaaaggaagataggtgtggggcccccagggagtatgtgggagccattgctgtgtaggtggaggtagttggggaataatctggtgagctctgtgaatttctagggttctcctgaatgctgaggggtgactcttgcagaaaactgaggatgcttggagaatagctgggagacacagatgaggccctaaggaatggtggtatagaggtgacagagataagggaggagcacagtgaggtctatgagtttctgggtgactcctgtgtgttcagggctgacccaaggagaaatctggggatggttggagaggagctgggagacacaggagagtccctgagggttgcaggtgaagagatgggagacgtgatagaagagggccctgagatttttgtctataggtgatacttgggtttgggaagctgaatgttgcagtaagctggggattgagagaatctgggagacacaggagagtacctgagggcctggagtaaagagttgggagacatggggccagagccctgtgaggtccctgagtttctgcttgttacatgggtgtcagggcctgactgttacagaaatctaggaatgattggagagtaattgggagacatgagactccctgagggctggtggtgaagagatgggagacataggggaggatcccgtgaggtctatgagtgtctctgtaattcctgggtgtggcaggcagactgtcactgaatatgaagaatgttcatggcttatatattttttatttttactttattttctaggtctcatcatagctcatatataacactcaaaacatcattaaaccatctaatctaatattcgaccatatcatttctttctttacacgacttgtgagataagtaagatatcagttaaaattttcatttcagcatctgtttttctcatatcccctttgtgcttcttaaagatggttaaaataggacagacagacttggaactttgttcaactgtcttaggaaaagaccattgcaggggcacagtctttcaaccccactggccatgtaagactaggcctggagcctggaacacatccttcccaagagatactgaacctctttcagactcattgagggttcttcaaagtgtgggtcagtggtccccaagggatgcccgcagctttcagtatttcacactccatgaaaacatcagcaactgttttcccagacctgacactgccaggtgtgcaacaatctctggattaatcctcatagagatggctccacttagggtcatctcatagggatagaattttgctaaggataaccccatcagttaccctttaagttttctttcctatcccaagggtattaacctctattatctggtctctcagttcaactttcagcttattacctttctgggatcagaggcttcaatatatggtcatccacaggattcaaattcatgattcaagggaaaggtcagaaagacatgttaatcaaatcttaaatatcaaagagtaactaaaactttgcctcatgaaagcatttttgcaagcataatttagacggtcagcactgagccagggaagcacccttctattcagaggactctcacatcagggaacatatcccagaggaaagagacaatgctacatgaggggaagaactaaaacatgaaaatagagttccttaatattgctttgcatatatgaaaataagcccacttgccctctatacttcccacgcattctcagttcttcatatgaaaccatttctggccaaaatttctagttacctatttccaggaatccattttattttcaatgaggaatgttcctaggaatctatgtcctaagtagtaatctgctcatgctattccaaacataaacctcattatcctgagggatctttgctatttggttgcttagtctttcctaaatagtcaaagaaggaaatctttgtatttcatttttggctttgaataatttttactcattatatcatttatcatagcataacagcgtacattccaaaaaggaaggcccaacataaactgagaaattgaatagatacatccataatccctttctattctaatccatacacaaatattttatcataatggttttagaagtgaatattatttctatattcttttcccacacttttcactatatatcatagacactttcctaaaatttataaaatcttcacatgtaacaacagcaagtgctgtaaggaacagattacaagctatctaattggaagatcatgtagtaaaatgatgcactaaaatatggttttccagcctaagttctaaacactacagcaacctttaaattttctcaataagcccactagtgttagcattccatttactctttatggaaaaagaggtctaacactggcagttggctttggcatatgattttctctgattcaggtctgagtgctttctgcaaggaaaagtgccagtatttattattttcataggaatatgtcataagaatcaagtttaacattgtatatggaattgccaggttgaaaagtcgttcatagactttccccctttcttttccagaacaaatttgagacacacaattaacagagggctggaagttttcccacatatattgtttttatagtagttcttccaactacatgtactaccttaaaataaattttttaaaagaatgaaataaaaaggaagaaatcccagctgatttacaaactagttacattcatagagtttctcttcagtatgagttgcctgatgcctaataagtttatagctattaatgaaagcttttccacactgaatacatgtaaagggtttctctccagtatgagttctttgatgcacaataagtcgagcactcaagctaaatgtttttccacactgattacattcaaatggtttctctccagtatgagttctctgatgttgagtaaggcatgaactctgtctgaaggacttcccacattgactgcattcatagggcttttctccagtatgagttctctgatgtacaacaagaacataactctggctgaaggatttcccacactgattacattcatacggtttttccccagtgtgaattctctgatgcataacaaggtgagaactgcggttaaaagattttccacattcactacattcatacggtttctctccagtgtgagttctttgatgtgcaacaagctgagagctccagctgaaggatttcccacactgattacattcaaagggtttttctcctgtgtgagttctctgatgagcaacaagtttataactttgactaaaggatttcccacactgattgcattcatagggtttttccccagtatgaattctttgatgtgcaataagtttatagctctggataaatgatttcccacattgattacattcatagggcttctctccggtatgtgttctttgatgtgcaataagtttatagctctgcctgaatgactttccacactgattgcattcataaggcttctccccagtatgagttctttgatgcacaacaaggacataactctggctaaaggatttcccacattgattacacctgtaaggtttctctccagtatgagttctctgatgggaaacaaggtgcgagctccggctgaaggattttccacattcactacattcataaggtttctcccctgtgtgagttctctgatgtgcaacaagatgcgagctccagctgaaggatttcccacactgattacattcaaaaggtttctcttcagaattatttctcatgttttgagtaagggaggaactatgagaggtttcactacatttatattgactctcttcaaaaggaattctctgttgttcattatgggatattttggggttcaaaacctgcccacattctttaaaatcaaaggtttttcctcctccatgaattttttcatgtatatgtaggggtgtaccatggcaaaaagattgaatacggtcactaaatccataggatttatcttttgtttgagttcttgtaaactgaataaggtgaatgctctgagggggttttccacattcattattttcatatagtgtctcattctcattaatcttctgatgactgtttacagcagcattaagatgccattttttagcatgtgatacatgtttatgaaaatggtttcttatgggtataactggggatgaaaatagactggaattcagaccactcttctccccagtttcatcacttttgcagactctctcatgaataactgctttcctttgagtgaatgccacttcctgcaaaagtatctcttgtttttcctgttgcttctccaactggtctttacaatcatccacttcttcacatgaagataaccaaggatcatcccttgtaaacctttctatcttcactccattagctggttcttcatcaaaaatcctctgctttgaagttgaatctttttttccaactgcagttgccaagtctgaaagaaagcaatataagacatcttagtcaaaaaatattagagatggaaaaatggaataaagctaacaagaaagtatgaaaaatatatatgaatttgttttcaaatactgaccgataacctaggttgaaaaagcaaaagggtgagataaagtattaagtacagaactaccacagcccaatattacaacagagcattaaaatggaactattgtaatcttggtttaatcttagtctgaataaataagactctggatgtcaaatacctgcatattccaaaataagatcatctacatagaacctacagaattgcaacccaattttgcaatatgtatagagagtcttttccactctttagtgctacacagatgttcactaagagattagtgtctacatatccaggaatttctgaaggcataaaacttgctaaatactctactctgtgtcagtgaggcatgaggaaactatgtttgtgaacaaaagaaaaggaatggggcattattatccagttccctaactaccttaggaaccaataaagccccacaaatttctgtgattccaactgagagagactagaagtttgctcctagtagcctgggtggctactaggtcaagcaatagagagtatatatggaaaaagtagtcatgtatacagtccaccaggaggtgggaaatgaagaaaaaatgtggcatcttctatgcggattttttcaaatggaccttctacacctgtaatgacccctatgtgtctggttctcacttgaacacatgtattggaaaattctttttatattctttcccttgctccaactaggagattgtatctgcttcaaaaagctgacaaggaaagatacaggaatttgagttttcaaagctggggacaaaagaaaattactgcagaatctggtcctggcctttggtctttaggaacatgaagactgaaaatctcaagcccaagaatctgcactatttctaccctacaaactaaaattaatcttcactggggaataaagagcacaaacacaatctagatgcagccaaaatcattctggctgctgaatttcacagttcttaatcgatcagaatgtgaaatcatttcagtagatggatcttcattaaagaggagtgtattcttaccccaagagactaggtccctgtggttctccaggatcacatctctgtccagggtcctctgagcagggttgcaagtaccctgttcctcccgtgtgaagtccacagtcacaattttgaagttcactccttcctaaaaaaggacacacattcctgctcagctgggcatcatttccttccaaagttcatggaggaggaaaagtctgacagatggaaaaaggaaaattggtgacctgggagttgtccttaaattgtcagtgcccaaaagattccagtcaagatgtacaggtgccttctgggtgagctctttgggttttggatgctggacctgtttttacaactccaaagaggaataccagataagaactgatataaactattttattttgtctgccttaaaaaggatgcttattctgacttttgcactggtgaatatagaattcccacttaggaattccctctaaattcccaagaaattaatgaaacaggggtggttgatttttttctgtcaaaggccagatagtaaatatttcacactttgccagccatacagtctctatcacactactcaactctgctgctatagcaagaaattagccacagaaaatatataaacaaatgggtgtggctacattacaatagatctttatttacaaaaacagccacaggctgtactttgctaatgcatgagacagaaaatgaaatgtggacctcgatgaaaagcagtatgtataggtgaagaacactggatgtagaagatacaaagacttggctttctcacctataaagggcatatatctgcttaagaaatacatctaatctgacaatctgtcctttttttttcttttgagacaagacctcactctgttgcccaggctggagtacagtggcacaatcatggctcactgcagcctccatcttctgggctcaagtgatcctcccacctagtctcccaagtagctgggactacaggtgtgcatcaccgtgcttggctaatttttaaaattttgtagagacagaccctcaatatattgcttaggctggtctcagactcctgtgttcaaggaatcttcccatctcagactcccacagtgctggaattacagggatgagccaccacacctgacccaattgtctttccctggcgagtttattccatttctatttattaggcctaataatacctaaatcattgggttgaatgaataattacgatgatctatgaaaagccactagcagagtttactgatgaaacaacgaaggccagcaattacaggctgagtatcccatagctaaaatacttaggactggaagaattttggatttcagattttgaaatatttgcatttacatgagatgccttgaagatgggatccaagtctaaacacaaattcatttatgtttcatatacaccttaaacatatagcctaatggtaattttatgcaatttttaaaaaaattttgtgtatgaaacagttttgactgttttgactatgagtggtcgcatgaggtcaagtgtagaattttccacttgtggcattatgctggggctccaaaaccttccaattttggacaatttcagatttttggattaggggtgcttagcctgtactgttatgattagtaggtctcaggatcctcaaagattaactgagagccaaagtgacctttattctgaactctcagtcttcaaataacagttctgtttctatccatatccagctgcatggcagagccttttaggagacgtttgctgttattactgccatataaatggggtctcttgggctgcctcctctaagcaggaaagggcctgttcttaagataactgggcaggaattttaatccaaaagagaagtgctaagggtgatctgtccttacccaggcacagcaaaggcaaggggaagtcgaatgcctcttgccactaaaggctctttaaatagaccaggcattcttgagctgcagttcatgaataggatacagggtcctgaatgccatgaaagcacatgcaaaatactgctgtatatgcctctaagtttgagcctaaaaatttcactgaaacctcaaatgttttcatgattagcccaacgtgaaattcaaaaaataactcgccaactgctgcctgtatttaacattaatctttaaggtattgtctttcaatctgtaatgcatgcttctttttaataaacactccccctttctgtgtaatataggtctctttagtataaagcttgttcaaatgtcaaacagataatactaaactagattagcacccccactccactcccaactatatattctcaaagttccatggacttctataatcacactttcttatttgcagaatggtcatctctgtcactaggccatgatccatgaaggcagggacaagtatttacagtttgcaaatgtaactccaatgcttagcatagtgtttatatatagtagatattacatttatatttcacaaattatttcagtaagtgaatgaacactatcaataaaccttataagatatcaaaataaccctcacccaaattgatttaagtcatcccccctcacctgaatctcacaagctgtaccacatacccatttgaaaaggcccctcaatgtgcagatactagcttttctggacttctatcccacttattctattcttctcacttgtcccaaattcctcatgcctgaaaactccttcccaaaatcttcaactgcccttgaaactcatcttttgtaacaataaaataggatgggtagggcggctcatgcctataatcccagcactttgggagactgaggtgggtggatcatttcagcccaggaattcaagaccagcctgggcaacatggtgaaaccctgtctctactaaaaacacaaaaaattagccaggtgtgctggtgcatgcctatagtcccagctactcaggaggctgaggtttggagaatcacctgagcctcggaattcaaggctgcagtgagccatgatcacaccattgcagtccagcctgggtaactggagtgagaccctgtctcaaaatcataataacaataaaatattgcagtttcagtatccttcaccaaacattccctatacatccctgtgttaatggagacttatacttcctgctgatgacttccctcctcctcagtcctcagaggctaagaatgctcatactctcccatcctagatctcagcatcaaagaaggagtgcatgtcctcccagttactctgaaactcatgccatttacctcacttcttggagctctgtcctacccacctcctgaacaccacccccaccccattcactgaagattcatacttgggatttatcctctaatataagaacttgtagtgtcttatctcatattgtctatagcatccacttgtatagtcagctgatgagaatataaaaataactgactttaatgaagcacttatgagtttgcatgaagcaccaccatggtgccaggcattgtgctaacatgtcatatggattattcatttaattctcaaagggctcctgtgagaaaacactattagcagtattatttttttcttatgaagaccaagggagtcagagaaattaagacatatgcctaaggttagtagtagagggataaaacctcaagcttgcacattgatgactgtgttctcagtcatcagttcatatggctaacccaagtctcatattctgaagctgctcttcatcagctcattcttcgggggacaccccagaccttgaaattgtcataaaacactccaccttttgaatcacaaatacaaaactgcccacgtttcactacaatgtcagattgctccactgtattggctcagttttttccctttactcttgttccttgaaagtttaaggccattatgctaccgaaatgtctactattaccactaccagcctatattctttttcatttctacttagtgggctctttatcacttccatattaattactcaatttaaggttcatggatcattctttttaatctttctacttgacgtatttttaaattctctttcaagtattcccttgacctttggagtgtccactccataggaagtggacctggcaaattacaaaaactaaatgaatctgaatgtcaatctgctatctgtggaaagtgggctacaaattgccactgcagggaaaaatccacaaaagcagcaggatagagtattataaattaatggccactatctctgaatgaaactttcagattgaccagcaatcctattacatttactggagcagcctgtttcctctcataatccaaaattgctattttaagccttctctacccttgtcatacatctctccattccaattcccaccatcatgctcatctgatttttcgcagtgaaagatcaagctttcaaataattccctcaacctcactgttcctatataaatccttctcctcatatagagctaatttattcaagatgttctgaattaatttctctggtgctaaccaaggactgtgctttatagtttctctcttgttgcctgatgaataactttttttcctctactaactccttcctgtaatcatttaaactgaattgaatattttcaatccctttaaaaaaaaccctcaatctcaaaagtccttgaagttttcactttcttctaccttccacacaataaccaaacttcttgaaaaagttgtccacttttgtctccatttcctcactttctttctttctttttttttttttttttgagatggagtctcactctgtcgcccaggctgaagtgcagtggcgcaatctcggctcactgcaagctctgcctcccaggttcacaccattctcctgcctcagcctcccgagtagctgagactacaggcacccgccaccaca[131 bp omitted]cctatttcctcactttctactcacttcccagccatgcacatttctcagtgtaaagacagaggccttgcccaacctacctgagatgggatggtcagagacccagtgtcttctccctcgactttgatgataatctcttgaggaaggaaagaatcctgaaaaggcaaaacagatgagaaaaaggaaaataatcagggagctaagtggcagctcaaatctcctccggtcagtgggctaagatttgacataccacctattttaacgcatccctcccaccatatttctcctccctcctcctagtggtaagctccgctaaccatgtggagagagagaggagatacatggaggagcaccaaggcccacagatacctggacatgaggtctttttgggtcttctgggccagcccattgcagctaaatgcagctgactgagtgatccaagacactaaggagcactaagacgctaagaactgtccagcgggacctgccaaaattcctgggtcacaaaattataagcaaataaaatggaatacagcataaccaatgccagaatcataaagaaaaagatcaacaaattaatttcataagatgtttagcaggccgggtgcggtggcttacacctgtaatcccaatactttggaaggctgaggcaggcagttcacttgaggtcaggagtttgagaccagcctggccaacatggtgaaaccccgtctctactaaatatacaaaaactggccgggcatggtgacacgcacctgtagtcccagctacttgggaggctgaggcaggagaatcacttgaacacaggaggtggaggttgcagtgatccaagatcatgccactgtactccagcctaggcaacagagcaagactccatctcaaaaaaaaaaaaaaaaaaaaaaaagtctagcaaaaggtgccacatgatcaataagaatctatactattaagacttcttccaaatcagtaaaaggtagcctcaactgacaaagaaaaatgcacatgcaactatgaagaaactgctgtgaatatacaaacagatgctcgcctctttacatcaaaatcaaacatctgtttctttatctgtatatattagagaccataagttcacatggatacctccaattacaattcaataacacattttattctgtctagcttttctcctttctttatgtatactttctttctctggctcccattttcctctttatatttacttatttgctcaagccctgtacataaccaacatcctgaccacgtcgggtgtttttgtgacagtcacagtcattagtctgttgctaatgactccagctctggcagcccactggccaagagcttcatatattcttagaagaagtataaattgatacaaccctcctgtattggctatatattaaatatctgtatttacaaatactgctttattttgaaatccttaaagattcacaagaagtagcaaaaatagagccacactcagctttccctggtaatatcatatataatgacagtacattgtcaaaaccaggaaattgaaattttggtacaatattattaattcatgtacagagtttattccatttttatgtacattcttttatttttgtttttttaaaggcaatatttttaaaagtgtaatgtaacatccattaagtctacttgtaagtacttatccttaggaaataacataaagtacatcaggatgcatatacaagaaacctcattagcaagttacattatcatagcaagatgggaagggagactaaatgtccactaggaagtgcctggttaaataaattatgctttattcagatgactgaatattatttagcagccaagagaagaaataaatttgcatgtaccgatacatataaataatagaaagatgtctataatatattgctgagtgaaaaaatgaagaacattatacagaagatgaatagatttctataaaatataaatatgcacggaaaaatctggaaagatgttctcaaaagcattaaaaggagttattctttgaaggggtagaactgaggagcaggttcactgtctctcttttaatgctgcatccatgtttttcaaaaccacttattttaattaaatatttggaaaccaggaaaggtgcttccctctttaaaaatcaccttgaaacaacgcaattcctttgtagtgtcctcaggttttttcctacaggatacaataattcagtctgttaaatgatagcccattcaaggatactttgctcctcctcaaatcaaacactgaaaagcaactactgctaatttttgataactcatttctttagaagccattggatcaaaaactaaaagaaaataaaagtggccaggtgcagcagttcatacctgtaatcacagtgctttgggaggctgaggtggaaggatcacttgagcccaggagttcgagcccagcctcagcaacacagtgaggctcccctgtctatacaaaatatataaaataggccgggcatggtggctcacacctgtaattctagcactttgggaggccgaggtgggcagattgcctgaactcaggagttcgagaccagcctggtcaacatggcgaaaccccatctctactaaaaatacaaaaaaatacaaattagctaggtgtggtatacctgtagtcccagctacttgggaggctaaggcatgagaatcacctgaaccggaagttggagtttgcagcaagctgagaccatgccacttcactccagcctgggcaagagagtgagactccatctcaaaaaataataaataaataaataaataaataagccaggcacggtggtatgtgcctacagtcccagctacttgggaggcaaagatgggaggatcacttgatgtggagaggtcaaggtataagtgtgtcaattttttctccttatctatctagaaaatattttactattacagtaggaatggttattaaaaatggctagcattaatgtatttaaaggtaggaaaggattctccaaacctaaaaacaccactgtatatttactgggtaggttgtgaggttcacaataagtatcaaagagccagagctgctgcaatgtaaagaaggcccaatgtgaaagccaagaggttgtgttgcttgcattactaccacacatactacaacagttaaactgcctttttattttttgtagaagacagggtctcgtcatgttgcccagactggtctcaaactgctggtctcagcgccatgacagttttgtcaggaagttaccctctatggtctaaaaaggagaggaaccctcagttctgggaattgcccaccccagtcctggaaaactcatgaataatccaccccttgtttagcagaaaatcaagaaataaccataaaaatgggcaaccagaagcccctggggctgctctgcttatggagtagccattccttattcttttacttttttgtttgtttgtttgttttggttttggttttgagacagagtctcgcgctgtccccaggctggagtgcagtggcatgatctcaactcactgcaacctccacctccggggttcaagtgactctcctgcctcagcctcctaagtagctgggactacaggcgcacatcaccacgcccagctaatttttgtattttttgtagagatggggtttcacc[139 bp omitted]ccctctccctctccctctccccacggtctccctctccctctctttccacggtctccctctccttctctttccacggtctccctctccctctctttccacggtctccctctccttctctttccacggtctccctctccctctctttccacggtctccctctccctctccctctctttccacggtctccctctccctctctttccacggtctccctctccctctctttccacggtctccctctgatgccgagccgaagctggactgtactgctgccatctcggctcactgcaacctccctgcctgattctcctgcctcagcctgccgagtgcccgcgattgcaggcgtgcgccgccacgcctgactggttttcgtatttttttggtggagacggggtttcgctgtgttggccgggctggtctccagctcctaacctgagtgatccgccagcctcggcctcccaaggtgctgggattgcagacggagtctcgttcactcagtgctcaatggtgcccaggctggagtgcagtggcgtgatctcggctcgctacaacctccacctcccagctgcctgccttggcctcccaaagtgccaagattgcagcctctgcccagctgccaccccgtctgggaagtgaggagcgtctctgcctggctgcccattgtctgggatgtgaggagcccctctgcctggctgcccagtctggaaagtgaggagcgtctctgcccggcggccatcccatctaggaagtgaggagcacctctgcccggccgcaaccccgtctgggaggtgaggagcatctctgcccggtcgccccatctgagaagtgaggagaccctctgcctggcaaccgccccgtctgagaagtgaggagcccctccgcccggcagccgccccgtctgagaagtgaggagcccctccgcccggcagccaccctgtctgggaagtgagtagcgtctccgcccggcagccaccccgtccgggagggaggtgggggtcagcccccgcccggccagccgccccgtccgggagggaggtgggggggccagcctcccgcccggccagccgccccgtccgggagggaggtgggggggccagccccccgccgggccagccgccccgtctgggaggtgaggggcgcctctgcccggccaccaccccgtctgggaggtgtacccaacagctcattgagaacgggccatgatgacaatggcggttttgtggaatagaaaagggggaaaggtggggaaaagattgagaaatcggatggttgctgtgtctgtgtagaaagaagtagacatgggagacttttcattttgttctgtactaagaaaaattcttctgccttgggatcctgttgatctatgatcttacccccaaccctgtgctctctgaaacatgtgctgtgtccactcagggttaaatggattaagggcggtgcaagatgtgctttgttaaacagatgcttgaaggcagcatgctcgttaagagtcgtcaccactccctaatctcaagtacccagggacacaaacgctgtggaaggccgcagggtcctctgcctaggaaaaccagagacctttgttcacttgtttatctgctgaccttccctccactattgtcctatgaccctgccaaatccccctctgcgagaaacacccaagaatgatcaataaaaaaaaaagaaaaaaagaaaaaaaaaagaaaaatttagaaatgggaaaaaataaataaataaataaataaacttgaccgaaagaaaagaaagaaaagaagagaagagatgagaagagaagaacaagaaagaaagagagagaaagagagagagagagaaagaaagagagaaaagaaaaagaaagaaagagagagagaaagacaggaaagaaagagggaaaagaaagaaagaaaagaaagaaagaaagaaagaaaaagcaagaaagaaagaaaagaaaagaaagaaaaagacaggaaagaaagagggaagggaagggaaagagggaaaggaagggaaagaaagagggaagggaagggaaagagcgaaaggaagggaaagaaagagggaagggaagggaagggaaagaaagggaaaaaggaaataggagaagggagggagggagggagggagggagggaggatggaaggaaaaagagaaaacaaagagaaaagacaatacaaaaaaaactactgttcttaagcagtcctcttgcctcagcctcccaaagtgggattacaggcgtgagtcaccacaactggcctaaactgccttgaaattgctgcatgaacattacaaaatagcccaaaatgccagaaaacaaaaataaaactcacaatgccaaaaaatagccacaaccaaactacagatggtacaagggagccacaagttttgaccccaaactgttaatggattcaatcttatctggcctgaaagaaaaattacattcctgatatacacccgtgacaaatacatcttttcttaaaaaaatgcctgggaaatgagaaaagttactcaagaaaggaaaatttgtaaatgctaacctgtattttaagttattacaaactccttcagataatatcacactctgttaattaaaaaaaaaaagctaatatcagttaagaaataataccaagaattggacaacttaatgtttttctcagcaggtacttggcagaaacaaaattccaaaatgtcactatctgccataactgctaaaactattatacttgcagaatatggttgcacctcctcttgaatgcaaactgtttttagcacctttttgtttaaaagttttcacaagaaaacaaaagaaagctcatctttcctcaaggtagactctggatgaaatgtccttccttgccctgaccccagcagtcaactctatcactttaccctgctttcatatcttcacatcacatatattcttctacctttggctttttatttaactcttccactagagtgagtttcataagagctgagatcttgtctgtcctgtttaccgtgactccaccatgcttagatcactactgacacatagcaggctcttcataaatgtatgctgactataaacagccactaggagaagggacatggaatgtgctacctgtaactttgcatttgtccctggggtccctggaggcactaaagcaaagctgagctcaagcccctcccttggttagaggaaacctttgttgggtgccttttctttgcagaaaattcaaagtgtcagtatccagaacctgctcccaacttactcttacaaactaaatgctcagaaacaagcttgcaacaaatgcatgtgagcccgtgcatgcatgcacacccacacaccctgaatttttccccaggttctactcactttggattactgaccattttaggaatatctcctgaatttacatcttagctccctcagtttccttcagataatgtcaatgtaatctatcatttgcctagtatttttagtaatacatagagtacttcaacacagaatttccatctcacaaaatcatctaaactttttttttaagagctagggtctcattttgttgcctaagctggagtgcagtggcaccatcatagcctactatagtcttgaactcctgggctcaagctatcctactgtctcagcctcccaagaagctgggactacagaggcacgccaccacagctggctaatttttttgtttttattttttgtagaggtgggagtttcactatgttgctcaggctggtcttgaactcctggcctcaagtgatcctcccatgctggtcccccaaagtgctgggattacaggtgtgagccactttacctggcctaaacttttttttgaagaaaagagtaatatgtctattctatttcaccaatgcagaaattaatggtaataaggtttagtaagctcatttaagtccactgattgcctgacacaaactcttctgcttcccactgtcttaccaaagtctgtctaatcacccaaggcccagatcaaatgccacctcctccatgaagcgttcccagatagcagaaagcttcatctcttcttctctcaggacttcttagctttggtggccctttactataccagtaaaattattctcttcatattactaccatttctatatacctctcccctgggtcctgggttctatattagaaagcactgtgtattttttatctttgtattctcctcagtattgagtaggagcacaataaaagttctctgcatttgacaagactagagacacgtgcagagtttgggacataggaatagaattaaaaacttttactctactttctgtatgctctggagcatctttaaattaccctcttgttcaacagtcacctctctaggtcataaaggagcatttccctttttctttgcagactttacgaaatgggaacaggaattagactgttgacttgcacagagaaaagggttgtgggcaggagataataattgttccttctgtaatgtatgtgggaccccatgggaaccaaagcagggggaaagagacaagcagagctatcatggagtgacctgtccgcttcatagtaagacagtggtcaaatcagacctagggctagggctatttgctcacctataaatagagatgaccaaatattcctttcccaatctgaggtattcttggggcaataaaatgaagtttctaatcaaatcacagaaatattactggactcaattctcagagctttgctttgggggtctactggcaggaaaccctctatatctgtgagaacatttagaaaacacaggcgtcacacaggcagacttcttggtgtgtttccatctcttcctgccctgggagctggaaggtggagctcacatttcagctcaagggatatggcgtccacagggcccatgtgggaggccctgaggtttcttaatcaccaaatctagaaggcgtaaaaccaatattcacaaactacagcactggaaagaaggttcccttccctgattttctcagaaatcatcctgacaagaggatccctttagtcctcacgcacaagaaaattccctctcctgccccaccttatcatccatgaataattctcactgtcctgaaatacacagaatagaccatccacatagggccaccaacaacctgcacaacttcgaatgttgagaatgacagtggatgggtgagattctaccacctacttggcagcagttttggtctcagtccctgaaggcaggtagggctcagagttggctcaaggccttcgctggaccagctgctacttcctgtgtatgagccactaaaatctctaaggtgatgccccaatacccagatggtttcttcctagatcagctcactggactcgtggccttcgttcaaagcaaagactttggctcccttgatttttctctcccttccagggttctaatatccttcaggtccaaatcaagtacttgttcatcttctgataataattaaaattaactagaggacattcagagttgagaagtgtggtagccagactctgagatggctcccaaagacccttactacctagtattcatgcctttgtgtagtccttgaccaatggtaccaaggtgggtctgtgtgaccaacagaatatggaagaagtgatggtgtgtcacttctgaaatcagatgataaaagacattgtggcttcatcttgattgtgtgcaactaagtgctcttgctctctctctctctctcactgggatcacctgctctggcagaaatccactgctatgctgtgaacgccctggaaagaggcctctctggtgtacagcacctcttgccaacagccatctgagtgagtttgcaacaatatcctcccacctagtcaagccttcagaagtcagcagcccagacaacaacttgcctgcaacctcatcagggaccctgagcaccagaaacaaccagttaagctgacctggattcctgaccctcagaaattgtgtgacgaaataaacattggctattttaagctgcaaaattttggggtatgtaataacagataactaatacaacaaacaggatgtttttgctttccctatgtagccttggaaagtataagaagcgcgtttctggttgtgagaactaagtcgtgcagggcagtgctgtctgtctcatctttccccacagtgctttgcacagggccttacactggttaggcagtcaataaatatgtgacaaaagtcatataatgaacagacttctaattcagctcacaaaaaagaaaatggtaaaaggaccattaagagtcccagaaaacacctagtgcctcgcttaaattagaacaccaatgaccacatcaaaacacattctaccagccaggcactgcggctcaccccgtaatcccggcactttgggaggccaaggtgggaggatggcatgatcccaggagttcgagaccagcctgagcaacacagcgagaccctgtctctacaaaaagtaaaaaataaaaaaattagctgggcgtggtggtgtgcacctgtagtcccaaatactcaggaggttgaggtgggaggatcacttgagcgcagaaattccaggctgcagtgatctatgctggtgtgccatgtactccagactgggtgacagagtgagaccctgtctcttaaaaaacaacaaaataacaaaaccccacacattttacctgtagttttgataaagatataaatgtaaacttatatttgcttaactctttctaaaacaattgcacatgtatacatggaatcccatacaaaacatttatatcaatgctatttgtaacagcaaaaaaatgtaacactaaagagccattaacaataaacccataaaacctgtaacatatttagaaggtgaaatgtgggcactaggtatgcgtagtggtattaggatgtcactgctcccagccctccgcggacagacagggaatctgtgtgcacacatacgcacaccgatacaagcacacatctctatatatttctagattaatgtgtactgaaaaccatgagcccacaataaaacctccaattcccactgcacaccagagtccactcaaatgttctttcttgccgtatctgtacctccctgatttgatggcaaggcgcctggctccagtcccttatatatacacttacttatctgatctagccccctgtaggtagttcctctcccatttccacaatgacgccctctccctatggatgctttcccagactccctgggctctgccaccccacactcggccaccctctgcccaggggagctcctcaccctgcttaggctttgactccccgggctaggctgccccatctctcagactcactcctctgccacttggacttggacagcccacgtcaggccaccccactgtgtcagtaccctccacatgccgctgggctctgacacccctgcaggccaccctcacgcatgatgccctcaacatgctcatgctctgacatgccacaccaggctgcacctgacccccaacacaggtgcacatctcaccccactctggctccaacaccccatctaccatggacacctgctcactgcacttgggctccaactacccacaatgaagcaccccctctctggatgccttgctcacctgctctgaccccatcaccccacaccagatctccatatatggacactggcctcagccacttgggctctgacacccacattgggctgcaccacgtgcacaagcgacttcttcattccacttgggctctgactatgctgggatgtcatcctgtgcagatgcactcctcaccctgcttggtcactgacaccctgcacatggacactctcttcacagcaggcagtcctgacaactgtaggtgccccctaacactgccccacctcacggcttcaaggctgacttgttcaggaagagaaaggagaagctctaatttaacagttttaagaaattaagagttttcaaagaatatttgcggtgggaaatgttctaaattgttaacttgttttttagagacagagtctcactctgttgtccaggctgcagtgcagtgacacaatcatagcttactacatcctagacctcctgggctcaggcgatcctcccacctcacccactcaagtatctgggactataggtggacaccactatcctggctaatttttaaaattttttatagagacagggtctcactatgttgcccaggctggtcctgtactcctggcctcaagcaatcctcccacctcggcctcccaaagtactgggattataggtgtgaaccactgtgcttggccaattgtcaatatttttaccttaaagtgtactgtacaaaaatatgaaaatacaagccaggtgtggtagcttatatctgtaatcctagcactttgggaagttgaggtgggaggatggcttgaagccaggagttcgagaccagcctggaaaacatagtgagatatcgtttctacaaaaaatttttaaaatacacacacacaaaaaatataagccaggcttggtggtgcccacctgtagtcccacctattcaggcggctgaggcaggaggatggcttgagcccagaagtttgaggc[137 bp omitted]acagataatgtttgttaactgattgctatatttatagtcttctaacatattttctatatacccaaaaactatatctctttttaaaaagtgatgatttctaagtgcaatttacttaacataggtaataaataactttttctgtcattaaatttgcattatcatcagtttcaatggctacagtgtattctatttcatggtcttatcgtaattcattcagctatcctcttacattgcacatttagtatatttccaattgttcattctcaaagctgtgaattgctggccaaaagggaatcagcattttaagggcttttgattcaggatgccaaattccttccagaaagagttatctgggctaaaaaggtgaggcaactagcagggagattcataaaatatatagtaagtgttagaagcctgatggccatgagggcctcaaaccccctaaaaggctgcaaagagagtcagggaggagccacagcctcccaagctgagagggtcaggctgcagacagacccaagctctgggtctccactcacctgtgcacagaccttcgggggctctgggggcttctcatcctgctcttccatgctctcctccaggcacagcagggtgctgaggtcctgagctgcactgagagaagccccaagtacagcatgaagatgtaggtctgccggaaccgctgggccccccacccccattagcccctgctcccaggatgcaggatgcattcccatagcaaatgcacttctggaggttcctgccagcttcctgcccaaatacctgtgtatgtactgagagtccctcagtccctctcccaggtcaagtttctgcagctccaacctggttcctccaccatcttgggcccctggaccatctacctgtaagcccagcttgtgcccaacatggccttctgcccaccaccaaagtctgcagcaccagtccatccctctcctattcactgggccctgggatccccacaaatatcaggcatattgaggaccccctggtgttcaccccatcctacccctaccaacctcaatctacagccccaaaccagcacttcttcctagggccagaatcacactcactgcctaactgcatgaagctggtgacacagctccactgctcccaggaactgattcaacaactaagactgatcctaccgttccatcagccagacctgtccctccagcaactcagcacagagggccacccacatcctgctcaaatagccaagcatttatgcacagagctcagctatacccacatcctgttccctccacacttctggggtccactggctcctactcgaacagcaccagccagattcccaccctaacaccctcccaggccctgaatttgtagctctaaaccagtccctccaccaacttgggtatactcaggcctgaaactacaacaaggcctgcatagggctgggggcctccaacagacaccagcacaagccagacaaaagcagccctacccaggctctaaatacatgtctcagaagctcaggtgcctctgtaccaactaggtgttttgggatccaagactagagggcaaatcctaccctaggcaccccaccctctgcactccatctctcccacttactctctcccctgctcccaccatattctcacgcagcatagcgtaggttcacaatgcagctgtttcctgaaattgcacccaaactgtttcctccaccttactccacagccccctgcttgagccacacctgcccagattctgaccaaacatctttcgggggcacctgtggctcaggaagatcctgtctttccaccaaactgggcaccatcaggctgtgatcagggttccaatcacacaaagaccccagcaccctctgtctaaaactcatctccggcctcctgtttcccaaccaaacaccggtgtgtgtgcacaaggggtgcctgacacagtcccgcccctctgcagctgctcccccccacacacctgggcatcctcaggcagaatcagggtcctaggactgcccatgcctccccaatctgcccaaatgccagcacacgtgcagagtgttgctggagcagccccgtgcctcctaagaccagatccaaactggagcccccaggcctctattccacagccactgcacacgggccacccacctagactccctcctactgatacagccacagagcaggttcgtgctcacaatctgcatccaggacctggctcctctgcccgtctgggggcacaccatgctcctgagtcaacaatctacatccctcaccctgtgtctcaacctgcctgggacatctcaggtacccacagcctctgtgtaggttctggggtcaactgccccactatttgcccgcagccaggacactacaacaactaaacagtagcttgagcatacagctccataatcagccccaggacttgggcactcgccagcgtgggggttctcgagcctacgatacagcagctcaatgggaactgggccctttgtccttctcttgcccaatcatgacggcctgggtgttgtgcagtcagctcttcccgggaccaaatctgcagcacaggctctgtccctctactaacctgcacattctcacgcctgcaaatagcgtacccaagtaaaggtctcagcaacacctgcttcataacgatgctggcaacatactgcttcctccccagctaccaatttgatggcagctgttgcagctctgtccttcctggacttaaattctgtatctccaacccggagtctctgcccatcttgaatgctctagagctctgcactatcctacataggtccctactatcagttcaagtttctgttttccattcagacacccccaggacgtgcagggggccctctgcccagaacctgtttctaggccctgataccctccttcagcctgggagtttgctgcccatgggtaattcccaccaagggttcactagcaacactgcctcttctggcacaagaatctgcaactccaatctggtctctccaccaaccacagcgcccccagaccttggagaagcgcgttgtctgctctaggggcccagagccacctgctcggaatcttacctacaaccttttgcttcctacccaaatacctgatcaagagtaaagggacagtggcacagcccctcctctccagaaaccacaatctgcaatggagcactccatcaacccggacatcctcaggcctccactaaataagcccggcattggaggaggggagttctcaagatgtccccttacatcaatgcatgtgccctgtgttccagcaacctgggcatcctcaggccccagacaagagcaccacctgaccaagcacccgcgcatgcacgcagaggacagtcgcggaatatacagctgtatcagtaactccatcaaccccggtgacccgaggctaaagcgccacccgcacagataccaggtctccccgctacactcaccaccgcttccagcttcccgcgtagaccctgcgcatgcgcgcatcggacaccaagcgctgccccacgcccctaccaacctgggcgtccgctggcccgcagcccaggctgggcctgtcaccgcctcagtgcctagcacggctctgcggcaggacgaactcgggttaggcaaccccctgccccgattctgcaacacggccgactcgggttaagctagttcggtcccctctcctagtcagcatccgcaaggccgctgggggttaagtctgaagggccgagctgctcggcgacagcaagcgtccgcgcgcgggacaatggctgctcttgtggccgaacccggaagtgcacttgggctcggagagccagaactacaattcccagaagcctccgcggcgcggacggtcagtaggcggggttccggcttctccaaggaagtggggcgggggaccgggccagaagctaagagggcgtcctcgtccggggcccgggggggcgccacacctgtgcatgtgcaggtctagggggagcactaagaccagccgcggcgccgggaggccgaggccagtgcagcgacgcatggggagtcgctctggcgtgacgtcagaatccaatagaaatggcggggaccctttctgggtgccccctgcctgtcagacgctgcgcgcgaccccttgtctcctctagtcctaggggaaacctgtgagacagttgcgacatccccattttacagtggagggagcgtctaccgaacccttcaggaatctatgtttttacatttaataatactaaaatataatcattttatttttaaattttgagttctttctctgcctataaggcctgaaggatctgttccccccacctctccccttttctctgtttttgttttgttttgttttgttgttttgagacggaatttcgctcttgtcgcccaggctggagggcaatagcgcgatctcggctcactgcaacctccacctcccggattcaagcgattctcctgcctc[212 bp omitted]ttccccattctccaacagatccagcagactccagcccctggtcgtttgcaggtgctctttgcactccctagcagcctctcctgagggattcatttggctctcaccgtctggtaattaggggaatatcatcttctcatgaggcattgccccaccacccgttgtgaacttgcaagcaaacgcttccctccccacatgctctgtgcctcccccttcatcttttatttttttctctaaagaacttttcactatctagcacactatatattttaattatttatttggtctactgtccgacctaccactacgatgtcaattccataaggaaaagcattttatcgatgttgatcactgctgcatccccaacacctaaaaaaaaaaaaaagagagagacctggcacataatagatgctcaataaatattcgttggctaaataaaggttcctgtctctgtattaaacactttaatatttcattaccaagcccaatcagcctatgaggtagttgtgttaattttcatcctaccagggaggtagctgaaaattggagccctgctgtatgaaaatacataattttttagtttttaaaatgcttgtcaaagcactcctgtagttttcttcacgtaaattctgacctttaaaaacaatgaattattactatttgaaatgtaatctctatccccaaagcttcttattattggttattgtggttgatcttttaaaaaatacttattttgtatctggttaacctactgcaatgttattaattcttacaatactccagttgactctcttggcttttctattgagacagttatctacaatttcatcttttccttaccagtattttaaattagacattctctttcatgttggattatattggctaccatttccaaaaaagtattactaaaagaggcattcttgtttgtgttcttttaatggacatatctctgaagtttgagggttaaatgtgacatcggtttctacattgaagtaagtagcttatttttttaaccttttattttgtaaatttcaaaacaaaagtagggactcaattaatgactccccaagacctatgtcatccaacttaaatattttcactcagtcttgtttcatctgtatttccacctatgttgtgcatttgagaccaagatgttgaactctagagtccatgctcttaacttttacattatgttgccgcttgtctacacatcagtatctttcctctacgtgcaagcaatactaagtttgcaaacaaaacagaaaaagttcgtatgtattcacaaaaaagcaaaaaaaaaaagccttataagtaaatttagtaagataaatatgtcatctgaagaaaccctcaaaaccttactgagagagaaaaatggacaaatagaaatgctgtgttgctagctgtgtgttgtaaagatgtaaaatcttgcagattgatctgcaaatacaaatatgacaaaatcagaatgggatgctttgagtgttaggtcgtcttccttttttcacttcatttatttttctgctaattgtttaagatattcagaaaataggccaggcgcagtggctcacacctgtaatcctagtactttgggaggctaaggcaggccaatcatgaggtcaagagttcaagaccagtctggccaacatggcaaaactctgtgtctacttaaaaaatacaaaaattagacaggcatggtgatgcacgcctgtaatcccagctactcaggagtctgaggcagaagaatcgcttgaacctgggaggcagaggctgcaatgagccaagatcacgttgctacactccatcctgggcaacagagcaagactccatctcaaaaaaaaaaaacaattttcagaaaataaagcgttagtactatgtaatgtaaaactgactttgtttatctgtcttttgtttagtcttttttattttctttcacaatgaacaaggtggtaatgtttacttccaggaacctataaatcctgacttaacctgaatattacagggactttagaagagttaccactgctgggcgcagtggctcacgcctgtaatccccacactttgggaagccggagcaggaggatcacttgagcccaggagtttgagaccagcctgggcaacatggtgaaaccccgtctctacaaaaaatacaaaaattagctgggcctggtggcacaagctgtagtcccagctactcaggaggctgaggcaggaaggattgcctgagcccaggaagcagaggttgcagtgaaccaagattatgctactacactccagcctcagcgacagagccagaccctgtctcaaaataaataaatgaataaataaaaattttaaagagttaccactcaggaacattctagaaagatgcctatctaatctagagatttatctgtcaactgtcgggaagagctgagaccaaagtttatattaagattctgtttattggccatgaattggataagggctcaagatacagtgaagagcaagaagattatgaatccatttactataaatactagaaaacaaagtaagagtaacgagagggtaaaagggcatgatctgtctctaggatgtcagggggagggggacatttcttggcagggaagaggaaagttctcagggttcaaatagggtggtgtttctggtactactgagtgcaacccttaagatcctaattccggtctcttgtatcacatctaatgattaatttttaaaatctgaattaatgttatcatcattatgatagccattcagctccaaggatagcaacaacgcattctgaaaactcttcatttccaggagttttcagtgttggtttccccctgtgttaacagtccttttttgtctcctttgcttgatctctcctgtaaacatcagaggaacccaggaatcagctgtcagcctgtcccttgccttgtcttcatccactctgcttggggttgacataacaggcctattgctcaaactctgtaagttccccagaaggtcctgttttcctgactagcctttgggcagctctgggaactgagctctcataatgttctatctggtaagagtgcttttgtttgcctgaggccttgagccatgctgtaccactttgtccagatggtttatactaacagtgtaatttatggaggaacatctgctttccttctaggagtctggagcttcagtgactgaccctttataaaaaccatggacacccaggtttaggtgagcttccctcgatggcaatgcttcacacacgttgtcacacatcattgctgggggatttcccatgtgctgtggtttggatatttgtctcctccaaaactcatgttgaaacttaatccccagtgtggcaatattgagaggtgggggtttttaagaggtgattggctcatgagggttttgccttcatgaatggattaatccattcatggactaatggattaacgggttatcatgggagtggaactggtagcttcataagaaaagaaagagaaacatgagctaacatgttaccacactcagtccccttggcatgtgattccctgcaccacttcaggactccacagagagtccccaccagcaagaagtgctctcaccagatgcaacccctagaccttagacttctaagcctccataactgtaagaaataaatttcctttttaaaacaaattacccagatttagatattctgttataggccaaagaaagcagactaatacaccatgtgactccactgaaagagaacacttggaagctggtgcagggtatcctccagacttcaccccatgcaccttttccctttgctaattttattctccatccttttgctgtaataaactataaccatgagtataacaattgggtcctatgaattcctctagaaaatctttgagcatgaggtggtcttggggacccccctgacagaggagctcatccagccccataactttaagtcccactgacaactctcaaatgtgtatctccagccatgatctgtctagatttttatgaacaattgcctacttgattctgcaactgattcttgacatgtctaaattcttgacatgaagcaaattctttatttctctccttatcccaaagtttctcagaaagtgacctgccaatcatccagttgccctggcaagaaaccatggagatatccttgtctcctaactctctttaccttcagcaaatctcattctgactctctccgcccctgcagttctcaggattctaagcatttcatgcctacctctcctcaggagcctcaatccctcacttcactacgtgttttctccttttattaagagctcttaatttcttaagagctccttgttccttatcttctatcatgatttgaaaagccacttcttctctgacacctgtctttgtcccctactcctctctggctgactcagactcactcttctctctggagtccaccaacagtgtttgctcatcctcagcctgcaactatgatatcctaagctgttcagtctcaaaccttggtcctctaactctagatccacgggctgtcatttttacccttactattgctttgaaaaaaaatatgagtcaaaatctaagattctatggaagccagggcctgaccaacccattgcagtagaacatcacaaggtctacagagatgacagagaatgactggcttataatatgcacttaataaatgtcattaaatatatgatcaagcatggtttctctaggactcctggagaaaagatctctgcttccattagacggaggggttgatttggatgtaagtgttgggctctggattcacaagctcctgttaaacaaagagaaaatgtgagctccatttgctaggtggaccctcccagtctactcactgtagtctggggcccaaacagcctggagctttcctttctttggaaattccaaaaatcttcctccattctcatcacactttagtaaccctggcacatctctgttcctggaatggcccatgtacttccccactgtggtaaacagactctaaagtggtccccataatccctgcctcctggtattcattcctttatgtaatctcctccccttgagggcaagacctgtgacttgcatctaaccaatagaatatggcaaaggtggcaggatatacatgattgcatgtatgtgattctgttacataagattatgacttctgtcttggcttgaagaagcaagatgcaatgttgtgagctgcctgtggagagggccacatggcaaagaactgaggatgacctccagctgacagtaagaaactgaggccctcattatgacagcctgcaaggaactgaatgctgctaatgaccacatgagcttggaagtggatccatccccagctgagcctcagatgagacctgggctttgactggcaccttgattatacagccttgcagaagagctaactaagcaatgcctgaactcctgacccacagaaactgtgagataatgaattcatgttgttttaagctgcaaagtctgtggtaattcattatacagcaactgataactctacaccctcttcagggccttttttactgatgcctctcaagttggaatgtttcctttcatactgtttgcatggtttgctccttctaatccctccagaatgtagcagacactgagttcactgagttgactgacctaaccttcttccccacaccacctcccttgcttgcttctattgaagaggctgggaatgttaatgtaccactttctcagcctctgttgctacaaggagcaccatatgaccttattctggctaatgagatataagaggaagcttactaggtggtatttctgggaagaccttttgcccgactaataataggaaacaaacatggctcccctacgcagacactggtgaagagagggacttaggtggctaagtttttaccagttcaaagctgattagagagctgacaaaactaaacatgatccataccatggcctgaatcaatctgattcttctatggagaatttgaacctagaaatgcttaaagggcagcagaagatgttgttatatatactctgaagttatagagaagcaatgaccaggacatttacatagaaattcaatctggattgagaagaatgagatgaattcatagattagtgaaaatgagaaactgtataataagagagaaacagcttcttgatagcattcaagtcgccaagaggcccaggagtaatttctgaaattgagttatctgatatttctcagtgttctctcaattaatccccattcgaactacattcaaagggtttaactttcttaacattaaaaattcttgactaagatattaatatatgaaacattcagccaggtgcagtggcttgcgtctgtaatcccaatactctgggaggccaaggtgggatgatcgcttgagcccaggaatctgaggctgcagttggccatgatcgcactactgcacacaacctgggtgaaagagcaatacgttgtctcaaaaaactaaaaaggtgtataggatattcacatttttcaagaatagttatctgtctgttaggctaaaatctacccttcttttacctatcctccatggtaatttatgtgccctctggaacaacaaggaacacatttatccctctacttgaagcctgtcagacactaaaatattggagttctctgtccctaaactttctcttttccaaacccaagaaaaccctgtcagtaggacatggatttgagcccctgttctggcctctctcttattcctcctctggataaattctgactggtcactggcttgttcagaatatagaatctgaagtccattcttggaattggagtaatctggctgtcctgatgacagggttgagatcacttgcattctctaaaataattctactagtccttagaactatggagccatcacttgactgctctaaacttgttactggaattttgcttatgcctggatgaactaatagttttcttcttttttatttttttctttctgagacaaggtcttgttctgttgcccaggctggagtgcagtagctcgacctcagctcactgcaacctccgcctcccaggttcaagtgattcttctgcctcagcctcccaagtagctgggattacaggtgcctgccaccatgcccagctaatttttgtattttcagtagagacagcgtttcaccatga[138 bp omitted]tgttttattgttaccaggaagcttagagacacataagagatatagtggcagatatcacgtaggcccagtatatatttttactttttacccatatattgacttcttgctattgttaaaaatattttttctgattgtaatttctatttctaatttaacaccattttgtagtgttgtatataaactgcttcaaatcttccatgggaaaaactgcttcaaatctcccatgagaaaaatgtggggaagtaaatatcatgaatgaaatgaaagattggaaaggaaaggaaatgaatgaaaaggaatagactatttaggaatgtaactgaaagagatggcaaaggcataaatgaaatggagggaaattgaataggacagaaaggaatacaataaaaattaaaggcagagaatggagtgaaataaaatggcatgatgtccaaagaagtgcaaatgaaagaaattaaatgaaaaggaaaattgtaacagaaagaaagaaataaagtaaaataaaatggagcagaaaagagagtaataaaataaggtaatgaggggagagaagtggagaggaaattagagaaaagtaatatagtagaaggaaagtataacattaaagaataaaaataaagcaacgaaattaaaaaaaaaacagaaaaggggggaaatggaatgccatggaatataaaataatgaaatgaaatgaaactgaaatcaatggtataaagagtaggaaatgcaaaggactggaaagaaatggaaagaacttaaatgaaatgaaaaggagtggaatggaatgacttgaaaagaagaaattaaatggaaagcttgaaaaggaaagtaataaagacaagggaatgaagtgccataaagggcatgaagggagaggatgaagtgagaaaacatgcagtagaatggaatggaatagaatagagtggggtggattggaaagaaatgaaaagggaaaggaattgaagagaacagagggagaggaatggaaaacagtgaaatagaattgaatgaaagggaagggtatggagaagagaaagtgaatggaaaagaaagaagggaatgggaaaaaagaaaaattgaatggaaaagaaatataaagaataagaactggaatgtagtggaatgaagtgaaaaccaatcaaatggaaatgaatgtaaatagggacattgcctaggaaggaatggagaggtaggaaatagaacggatgaaatggattaaatatatggatggaaataagaagactgaaatgggatgggaagaataagaatggaaacgaaataaagtcgtgggatgggaattgagtgggctggaataaaacagagtgtaatggaatgtaaaataaatgaattgaaaggaattaaaagaaaaaataaaaatggataaaatgcaatagaaagaaaggaaaagaatgaaaaggaatgaaataagaaagagatggaaaggagtgtaaagggatcaaacaaagctgagtggaatggaatgaaaaggcatggaatgagccaggcagggtggctcattcctgtaatctcagcactttgggaggccaaggcgggcagatcaattgaggtcaggaattcaagaccagcctggccaacatggtgaaatcccgtctctaccaaaaaatacaaaaattagctgggtgtgatggctcgtgcctgcagtcctagctactcgggaagctgaagtgggagaatcccttgaacctgggaggcagaggttgcagtcatcagagattgagtcactgcactccagtctgggtgatggagcaagaccctgtctcaaaaaaaaaaagaaagatgaaaggaaggaaggaaggaaagaaagaaagaaagaaagaaagaaagaaagaaagaaagaaagaaagaaagaaagaaagaaaaaggaaggaaggaagaaagaaagagaagaaagaaaataaaaggcatggaatacagtagagtgaatgggaagagctgggatggggggaaatagagtggaaggaaataaaacccaatgggatggaaagaaaatggcagagtgaagtgatatagaaatacagaaaatgaataaagctaaatggatagaaaggaattgggtggagtgaaacatggaatgcaataaaatggagtgcgttggaaaggaatgaagtaaaaccaactagaaaatgacatgatggaaatggataggatggaattgagaagatttttaaagggaaatttttcttcatagttcatcctacagactctttagtagggaagaaaaagcagattggtgacagatttccacctgtccaaagactcagtgtggcataaacatacctcatagattgactccatgttttttggcacagtggagaccaatctgagtgggggcatcagaggtttgggtggtggcttccaggggctgaaagaattgcctctacggcttgctgaaggcagcttcgtctgcaagtaagcagagaaattaggcagggcccacagacacagattgccaggaatgtaccaacttacactcttcagggaccgagagagtggaaggaatctgttcaggttcttgcagagaatcagaggtggaagcagggttagaacccaggcccttgccctggcccagaactctcctttttcctgctggatctgcaacctctactcccagcctccttttcaccccagcatgtgctggtccagtaccacctcattggcaatccaattccaagccctggaggtggaaggaacgaaagaggatccagggtcatggcatctgacccagctctctgtgaggccttaggctactctcttcccatccctggccctgtgatgtgccatgaaatgtttagacaagatgatctctcaggcttatcacatataaaattttcagattgtctttccttcatagattctttaaccaaacccagcagggccaatgtacctcataggtctcctctggaaggtctggtggttgcatctggggaaaaacaaagttgcagagaggtcatagggcttggaataggggctaccccaagagatgctcagaaatagctttggcctcagaggcaattatagcacttctgattcccagagggctcaaagctaggaattgtcatgtcaaagaataagaagacgaggagaagagatgaaaaaacccgggagggtcttgagatcctcagagaagtcagaggaggagatgcagagagacttaacctggcactgggttttctcaaaagatcatgccagcccccaccctaagaagtaagactatagcagcctggtcaggggatcaaggagggttccctctgcagcatcactcaccagttcgactctgatccgtccctgaagctgggatatattgcgatactcaggactcaggctttctagaaaaagtgaatctcagtcaggagctggagttcgaaagagatatggggcaaggggctgtttttccaggacccctgaccccaggaaggaagtgcagaaatccttcccaggactccctgtcatatttccagtgagcttgaccaggaatgtcctggcaatcaaggtctgggttaggtaaggctgtttggtgacacagatgaggggagaaatctaaattctagcccagttttgacactgggtcctctgtagcctggatttagccctttatccctaatggccttggttttcgtctctataaaatggggctggattggacagtttctagaaagccttccatatcaaaaggcctatccttccagaatcccagacccagagatggcaaatacgtttcattttgtctttggttaactctaacccatcagtagagggcactcgaggcactctactgagatatgttatgaggctggatttggattcagcaggaaggagtgttgtggttgattcattctgtctacaacaatcagttaaaaaagtcttctgagattgagaaaggagagaattccagcctgttgtcctgcttttgccgggactgttggaacaggcagaacccatcagagggcttgactccaatctcatccaaattccagatgggaacacagaggctcagagtggacagggcttgccctgatcatacagtgacctggtggcaaagctgggagcccccagcaccagcctcttccccagccctcacccctgccccaggcatcagccaccatagagtcacttaccggaactgggctctgtggggtgctcctccttcgggatgggttgtgaggtctcatgactggggtcctctgttgttttccttgagggcctgaaaccccaaagccctcattattctgtgcctctagtccttgcccatctccacaggttctgcccatatcccatgtccattcttgaacaatgcccacaaccctctgaattccccaggtgccagacaagactcagcaccatggtcagcaacacgcccggcaagcgccccctgctggccacatccccatccccatccccctccctgtatccctgtgttaccgtctggcatttctgatgcagagaaaatagcccagttctgaggccacagcaatgacagccaggatcccgatgacaataccagcgatggcccctgaggacagggaggaggactggggacctgggcaaggagacagaatcaagacccaggcttgacacaccctcatccctgctcccagcccgttcccaagcttgcagctttttctctactgacattttgtgagcacttgttttccagtcgttgggaggtatcagattgtggtttttggttttgcttttttttttttttttttcagacagggtcttgctctgtcacccagactggagtggagtggcgtgacctcagctcactgcaacctccaggttcaagtgatcctcccacctcagcctcccctagtagctgggactacaagtacctgccaccatgcaggctgattttttgtattctttggtagagagggggtgtttcaccatgttggccaggctggtctggacctcctgacctcaagtgatccgcccacctcagcctcccaaagtgctgggattataggtgtaagccactgcacctgacctcagtctgtggtattaacagcatcatttctaaactaaaacatccagtttctgcgtccaaatttcagcagtgtgactttgggcatgctacttaacctctctaggcttcagttgtctcttttgtaaaatgggaacaatagggtttatagggcttctagaaagattaaacatacatgtattcattttctatatatatagtgtttgtttggaaccatggaaagtgatcagtaaatgttggccatgatgacaatgtcagttaggataatggatcaaatatggctttgtgtttctttcctcccagaatagaggcacagaccagagaaaagagctttggcaaccagaaacccggctttcacttagagccccttgactcactgcggccatgtgaccctggacaagtgaattcatttctgagtctcatttcttcatctgtaaatagcacaggatgtttgcaaagatgagatgaaatcatgaatgttaacacctggcacatactaggtgattaataaatggcaattgttttcatcaatattggcctgccgattgcccatctcacttctgcctgaacctctctcaaaagggtggaatcgagccactgagttaagaacacagctacaaggatcaggagggtgaggaaggagctctgctttggaggggcaggagggaacttcctggggtgcttcagggattcttaggttcatttctgcatctccactttttttttttttgagatggagtctcactctgttgcccaggctggagtgcaatagtgtgatctcagctcactgcaacctccacctccctggttcaagcaattcttctgcttcaccctcccaagtagctggaattacaggtgtgcactgccatgcctggctaatttgtgtgtgtgtgtgtatttttagtagagatggggtttcgccatgttggccaggctggtctcaaactcctgacctcaggtgatccaccctcctcgacctcccaaactgctcagattacaggcatgagccaccatgcctggccgcatctccatttctttatatgccaagcaaggataagaattccaaactctatagactttttaaaattttttttaaatttttaaattttaaaatttaaggccaggctggagtgcagtggcacgatcttggctcactgcaacctctccctcctctgcaaccactgcaacctcgctgcctcccaagtgattctcctgtctcagcctcccgagtagtgtgattacaggtacccaccaccacgcctggctaatttttgtatttttagtagagattgggtttcaccatgttgccccggctggtcttcaactcctgaccatatgtgatccacctgcctcaacctcccaaagtgctgggattacagacttgagccacagtgcccggcctctatagacttttgaagggattaatgagatcttgtataaaactactagcacagtgcctgatacataccagatgcttgacaaatgatgatgatgatgatgatgatgatgatgatgatgatagaagctgctatctagcaagctctaagcaccaagagaccttcatacatgatcttattcaaatcctacaatatccccgtgagcatcaactgaactccctgctgccttccctgagcctgttgctccatccatcaaatggtcttaataagaccacaagattgttctgaagattaaatgaggtaatttggaagttgatataaatggtgtcctaggcttagtgaacaacttgaggaggccagcctggtttcaaaccccaatgacaggatttgagtctataggtctcagtttcccttcctgtacaatgaagaaaccaacaggctcacctcaaaactggctgacagagagtacccaagaagtgtttgctgatattatatatgggaaagttggattcagacatgtggcacaggctcaataaataataattttaggctgagcttcgtggctcaagtctgtaatctcagcacgttgggaggctgaagcgggacgatcacttgagcccaggagtttgagaccagcctatgcaacatagggaggccccgtctctacaaaaaaatataaataaaaaactagctagctgtggtggtgcacacctgtagtcccagcttctcaggatgctgaggtaggaggatagcttgagtgtgggaggttgaggcttcagtgacccatgatcatgccacacacacaaaaaaaggaataattttatttgtttaacaaacacaatatgccaagcactgccctaagaactttacaaatgttcacaaccttcaacaaccctaagaaataggcagaattattatgttttacagataataaatcagaggcccagagagggtaagtaacttgtccaaggtcacacagctaacaagcattggagaaggatgtgaatcccagtgaacagtgacactgttaccttctcaagaactaaagacagagatacagggactccctgccagtcatgtccagttgttattaacatcatttccgattccccatatagctcactccttccctcactgggtatatctctgactcattgtccttctaagcaactctgaaagataggcatcacgatatgatttggctgtgtccccacccaaatctcatcttgaattgtagctcccataattcccaagtgttgtgggagggacctggtgggagataattgaatcatgggggtggtttcccccatactgttctcatggtagtgaataagtctcacgagatctgatggttttataaagggtttccccttttgcttggttctcattctctcttgtctgccaccatgtaagacatgcctttcgccttccaccatgattgtgacacctccctggccacgtggaactgtgagtccattaaacctctttttctttataaattacccagtcttcagcatgtctttatcagcagcatgaaaatggactaatacacatcacaaacccaatttacaggcaaacaaactgaagctcagaacagcttggagagttttccagggaacacagcaggaagtacaggttctacatttccctgaccactaggggttgggattcaacagctgtggactgagaacctgctcaggcagtgtggagactgccacactccagccctcggtaggggtagactaggtagctgggaccagcatcaggaaaggcccctcgggtcctgggagaaggcgaccctgagagactcacctaccaccttgaccaggactgaagtggagcgggccaggccagtgagagagttggaggctgtgcagttgtagatcccgtcgtgttcccaggtcagagccctgataatcagctgctcacccaggtgctccccggtggagtgttcaagagtccagcgatactcagcacctggcttggactcggcccaacactgcagggtcaggctggagttgagctctgcctctatggtgctgatcatctcagatgccgactccctggtgatgtgcacttggtcaggaccatctgtgtgtaaagccaaacgtgatgcaccctggcccccatcagcgagtcatcccattctgccccattcactttcaccttggaatttcagtaaaataaacagaacatactcccttttcctccttagctctctgacaagcagagtgtggtccacaacactgggggtggggcagatcaaaacaaaaacaagggccaggcatggtggctcatgcctgtaattaatcccagcactttggaaggccgaggcaggcagatcacgaggtcaggagatcgagaccattctggctaacatggtgaaaccccgtatctactaaaaatacaaaaaattagccgggcgtagtggcacgcacctgtagtcccagctactcgggaggctgaggctacagaattgcttgaacatgggtggtggaggttgcagtgagccaagctcatgccactgcactccagcctgggcgacagagcaagattccatctcaaaaaaaaaaaaaaaagaaaaaaaactgcctttgtaaaagttaattcaaagaagtgttttaggtcacccaggcatcagaaattgttgctaggccaagcgcagtggctcacacctgtaatcttagcactctgggaagccgaggtaggtggatgtgagtggaactcctgagaccaggagttcaaaaccagcctgaccagtgtggcgaatcacgtctctactgaaaaataaaaataaaaactagctggatgtggtagcacatgcctgtaattgcagctactcgagtggctaagaatcacttgaacctgggaggccgaagttgcagtgaggcaagattgtgccactgcactccgtcctaggtgatagagtgagactcaaaaggaaagaggaaagaaagaaagaaagaaagaaaggaaggaaggaaggaaggaaggaaggaaggaaggaaggaaggaaggaaggaaggaaggaaggaagaaagcaggcaggcaggcaggcaggcaggcaagaaggaaggaaggaaggagagagagagagagagaaaggaaggaaggaaggaaggaaggaaaggagggaaattgtggctgcgtcctgtgtatataatccctaacttctagtactgtgtattctcaatggtataaacacgtgcaaattttctttgtaatgtcagaggggatcattgtcacttttctcttccaccacatataagaaggaaacaaatgaaagtagttgttggatttctcatataaattaaaagagtttaggcctggggctgaggctcatgcctgtaatcccagcactttgggaggctgaggcagggagatcacttgagttcagggattcaagaccagcctacgcaacatagtaagaccctgtctctatttaaaaaaaaaaacctaaaagagtttaagagtcatactttatttaaattaatgtaaaatactggaaaggatgcaaaaggttgctaattgagacattctaggaggggaggaataccctgactctgctccctcctaaacatcatttgaacctgctcatttctccccatcctgaccccattgacacttggatccttcacctgcatcccagctcctcctggtctccccatcccagtctcatcctccacacagcagccagagaagtcttcctaagtactaaagtgtcactgtccctcctgtgttcagaaccctctgtggctccccagtgcccttgggacaaagcctatgtctgaagaggccatttacaatttgattcttacagaccccctccagccccacctttccacacctcttgctctcattcaggaattaaatcccactcggagattccatccttgttacactctctcttgcctcaaggccatcgcacactctcttccctctgtctagaatgctcttccctgactctgctctaagcagcctactcctactcatccttcagctcttatggtggacatccccattcatgatgaccctttgcaacatcccccagatggaggcttcctttgggctccccataccctccctttgtcccccggggtcccatttatcatgctatgttttatctgcctgcttagtgacctccccatccccagcaggctgtgaaagctgaaaatcatgtcaagtatcaaatgcccaacatgttgcttagcacagagagagcacaaaacatatatttttggtttaatgactgaattgaaaaggaaagaggagtgagcaacagagaagtgtaaagaggagcaaagacatgtactcaacccctacctctgtgttccctactgcttcgcatgtatgaaagtgcacccctcctttctctccctgcagaaacctcttctcccccaatcttctccatcttggttcgtgactcctacatcctttcggtggctcaggcaataaaccttacagtcattcttgactcctttctttctctttcacctaatatcagtcagcagcatattcaaaatacatccacagtgcaaccatttctcaacacccgacagttgccattctggtccagccctatcatctcttgctgcgcaactctggccaccaggagaagctcttcaaagacctccaacggcagaaatgtaattgaccaagggcccaattgctgtgcccccaaatctactcccagcccttccacaggctgcaccctgccagtacctgagtgcatccaggaaactaaggcaggccccttcctgggagatatggaaggtcccaacagccatgatgggtgttccttcaagtgcatggttatccaggtgcttccattcaagtctctgtccctcaccctgtcactcggggtcacacttgcatctcagtctctcagtctgatggctctcccagcctccctgcagctgcctccctagttatcctcacaggagcatttcccctaataaaacccttgcatgaataatcccgttaatcccaccttggggtctgcttctccaaggatctggacaaatacaactccttctctcactccccctctcccccacttctatgtttgcctccctgtagacaaaggccagtgagaccctgtgaaagcctaaatctggtggtgtccctaagccttatcacctgcttctctgtttatggtctggcttctccactagaacataagccccctgagggcaggcacttggccctgtccagtgcccagattcatgcctgacacagagcaggagctcaataatcatagcatgaatgactagaaggaagaacttaaagagaaggagggaagcagggagatggggaaggtccaggccctgggtgactcacagttgatggtcagctcaaggggctcactccgggcccggctgccccagttccagacctcacaggcatagggcccggtgtcattccgctggaggccatggatgattagggtcctgttgtcagctgacagctgcaggtgctcactgggcaggaggggctggccacttaggaaccactggacattcacactctgattgacggtttggcaggtcaggtccacagacctagcattctccacaaggttcaggcttgaaggcacgacttgaggcatggtcagtgtttctggaaacacgtggagatacacagtcaggttcagggagatttccctcatctcctgcccttgtggggcccacaagtttttccaggagtgcgtgcgtgtgtgtgtgtgtgtgtgtgtgttacaggtggtgtatatgatttgcataatgctggtgtgcggggtacgtgtatgtcttttgtggatgaatgtgtgtcgtgtgattattatgtgaatatgcaatgagttttgtgtgtatggagagtgtgtggtgtgtaagtgttttgcgtctcttgtgtgtgttgggtgtatgtgttgaatatgaagtatgtgtgtggtacacatatgcactttgtatgtgagtatatgctatgtgtatatatttgttgtatatgaatgtgtgttctgtgtctgtggtattgtttgtgttatgtgtttgtgttgtgtgatgtgtgcatatgctgtatgtgctgcatgtggtatgtgtgtgcattttgtgtgtgcattgtgtgtctgttgtatatatgtgttgagggtgttgactgtatggtatatggtgtgttttccatgttgtccatcttgagtgtctgtgatgtttaatggttgtaatgtttagtaggtgctgaatgtcaatgatatgtgttgtgtgtgtccattagtgcatattaggtgtatatatattttatgtgagtgtgtcatgtatatgtgatcttgtttgttgtgtagatgtatgtgagatatgtatgtctgcgttttgtatgtcatgtgtgttgtacatgtgttgtatgtgtgagcattttgtgtgtgtgttgtgagtttgtgtatatgtgttgtgggtttgtatgtatatgctgtgtgtatatgtgtatgtgctgtgggtttgtgtgtatgtgctatgggtttgtatgtgttgtgggtttgtgtgtatgtgttgtatgtctgatgtgttacgtactttgtgatgagtgagttgtacacctctgttgtgtgcatgctatatgtttgtatgttttgtgtgagtgtgtgttgtatgtctgtggtattgcacagttgtgtacgtattatatatgagttgtgtttactgtgtgtattgtacatgcacgtgagtgtgctgttcatgtggggatattatctgtgtgtgtacggagtgtgtgaatgttgtgttagtgtttttaaatgtagacagttaaaccccccacctccagagagtcaaatcatgggcaacccctagagagccaccagggtctcgtgcaggatgtgccaagccaggcaaaggagccagtgtgcccagccttccctgtagtcggagccctgctgcattggaaatccccctgggtcctcctcaaactctggggtatt[131 bp omitted]cctcagcctcctgagtagctgggactacaggcgcccaccaccacacctggctaattttttgtatttttagtagagacagggttt[141 bp omitted]atctgatgacaatcctagatccttcctctagaacacagcgcaaacatttttcatgcaactcaatgtcatgcagggatttctccctcacacagtatccaaaggccctggattaagaactcctggttccttctgacatggccagcatctgacgctcagaagaatgaaggagaggaaccgggaaaggagactcaccaagtactcggaccttcagagtacccaggctggacaggtgggtggcactgttggacaccaagcacctgtacaggccctcatgttctctggacacagcatggatggtgaatgttctcgtggtgtgagacagaatggagtcaaggagaaaccaagtataggcacagggtgggtgagactttgtttccgctaagaaggtcatgctggagccctccatcacctcaaccacctccccactggcaacaccagactccaatttgatttcaacaggatcaggaccatctgagaggacaggaacaattacagcagtaacaacagcatcagcaacaggtctcttatggaggtctttaacggatcaataaatactttatttccctcctccccactcaaaggctagatcaattgcaaacgaggtacagcagtcagatggagatgaaatgtcagcctcatccctgggtaaagcaagattgaaagacacgtctaaagtatgccagctgaatggttattgtagctcacacctgtaatcccagcattttgggaggctgaggcaagagaattgcttggagcaaggagtttaaaaccagtcagggcaacataccaagatcccatctctacaaaaaatttaaaaattagcccggtgcaatggctcatgcctgtagtcccagctactcgggaggctgaggcaggaggatcgcttgagcccaggaggtcgaggctgcattgagctatgattgcaccactgcactccagcctggacagcagagagaaatcttgtctcaaatgaatgaatgaatgaatgaatgaatgaatgaatgaataaagtgagccagctaatgctctttgctcacccctatccaggcaaggttttggatcaaacgtctgaggtttgggagctcaattttagttgagcttcacattaaggcatacaggcatgagccattgcaccgggctaatttttaaattttttgtagagatgggatcttggtatgttgccctgactggttttaaactccttgctccaagcaatcctcttgcctcagcctcccaaaatgctgggattacaggtgtgagctacaataaccattcagctggcatactttaggcatgtctttcaatcttactttacccagggatgaagctgacatttcatctccatctgactgctgtacctcgtttgcttcacattaagttggaggtttccagtagaatccaagtagagatgtcaaacagttatatgtctgaagttcaaaggtagacaagtccgcatctggatggtatttcaagctgtgagactgaacgaggcactaagcaagtgagtgtcagtgaggggttggagagaatggaaagggactcacacttcacatccaggaagatggggtcgctcctctggctcagaagggcatctcgagcttcacattggtaagtccctgagtcctcccgctggacaatgagaatggtgaggatcttgccatccttggacagctgcatgcgctcatggaacacaatggagaggttgttggaaacccagtggatggtaatgttgacgtccttagtggtgcagtagaaggtcaccatgtccttctgctctatggcagtgcctgggctgactgcaatggagggtttggccagctctgaaagcaagcgagggagacagaggcagagacacaggtagaggaagaacaaacaagacatagtcacagagggacccagagaaacaggactagattggaattgccagaagactctctggagttggatgcctgggcttgaatgctggatctactgctcattcttggtgtcatcttcggcaagttacttcccctctccaagccccattgaaagtgattgtgcaagtgaggcagagggtctgggacctgacaaggagtcaatcaatgtcagctgcaatgacaatcaagcttacgacatgggtgccagcaagggccccctacccactctttttctttattgaaacagggtttcattctgtcacccaggctggagtgcagtggttcaatcacggctcactgcaaccttgacctcatgggctcaagcgatcctcccacctcagcttcccaaatagctgggactacaggcgtgcaccaccaaacctggaggattttgtgttttttttgtacacatggggtccccctatgttgcccaggtgggtctcaaactcctgggctcaagtaatccacccacctcaacctcccaaagtgctggaatggcaggtgtaaggaactgcacccagcccccctacccactttttagccaactttgcccaccccagccatgacagccacagccctccctctttacccctgacccctggcacagctgactgaaccagttgttgctggaccctggctgagccaatcagattcgtcctctggggactttgggcgtgaggttcggatgagggatctccatggaggcagagatcagaatgaccgtcttgttttctggcccctacctctggatctgccatgaatctggggtgtcctgggggtcccaaacacaggcagaacaacatcctcactttgggtggcatcaagtgggttggcattgagggtgagctgggctgcagctggaggactccatacggtacaaagcgaggctacaaggggagagaggaggcattcagggagggagaggtgtgttgggggttgcccggctaaggtcttcagaagcacagggagctctgaggccataggactggcattccacccacagagacctgagtcctactcgttacttacagctatgtgacctgcagcatgttttcttgtttgtttggtttttgtttgtgtatgtgtttttgtttttgttttttgaggcagagtctggctctgtcacccaggctggcatgcagtggcgcaatctcagctcactgcaatcactgcctcccaggttcaagggattctccagcctcagcctcccaagtagccaggattagaggcacaggccaccatgcccggctaatttttgtatttttagtagagacggggtttcgccatgttggccaggctggtctcaaactcctgacctcaaatgacctgcccgcctcggcctcccaaagtgctggaattacaggcatgagcccctgtgccagctgcagcatgtttttgtcctctctgagcctcaatctcctcaactgtaaaatgggcatactatcacctgcttcctagggttgttgtgggggtggcaatgaatattggcaaactttgactgggtcccctgatagtcactgtgttctctccaatgatgtgccctctactggagacacgtgatggtccctgtattccacatagagaaaaaaccgatgctcagagaggtgatgtcactcaccaagatggtattgtcaatggcagaagctaaacttgaacctggcctgccaggccctgaagactgtgctctcaacactgtaattcctcctgtcagcccagagatggccacacagccaacccttgattaacaggtacttctactgtgatcttggtgaaaaatattaacttttggtacttcctctgatgtgccccaggcaagatctcacttgcatggggaggaaaggagaacaagatagcaggtttccagttttcaacggggtgtggtggctcatgcctgtaatctcaggactttgggaggctgaagtgggaggatcacttgagctaaggaatttgagaccagcctgggcaacatagtgaagctctgtctctaccaaaaatttttaaaattagctgggggtgttggcccgcatctgtagtcccagctacagtctgaaatgggaggatcacttgagcctgggagtttgaggctgcagtgagctatgattgcaccactgcactccagcctgggtgacggcaaaatcctgtcttaaaaaaaaaaatagaaacacacaaaaaaatgagttcccagttttccatttgatcattctgcacaccactacgggggctgcaagagactatgggacctggcgcggtggctcatgcttgtaatcccagctctttggaaggcggaggtgggtggatcacttgaggacaagagttcgagacctggtcaacatggtgaaaccccgtctctacaaaaaaatacaaaaattagccaggtatggtgatgtgcacctgtaacctcagctacttgggaggctgaggcacaagaatctcttgaacccaggaggaagaggttgtcgtgagccgagattgtgccactgcactccagcctgggtgacagagctagaccttgtctcaaaaacaaacaaacaaacaaaaaaaaaacacgagactttgctggggcccaaccccagcagctgtgctcacacgcaactgatctcatctctcccatgagctcaattaacacagaccctctgcacttctcaaaagggccccaatgtggcccaaacactgccccattccctgcccagtgagtgaataagggcacgagctcttaggaacaaatatgaactctgtcacttactagccctactatcatgggtaagggactttctctttgtgagcctcagtttcttccactgaaaaatggagataatagtagaactcagctcatctggtggttgtgaaggctgagtgagatatcaaatgtggcatgcttaacacagttcatagcaaatattcagccaccatgatggcaacgatgatgatgatggtggtggtcttgatgatgagttcttgtgtctgtggtttctctgcctcaaatgctattagaggttaggctcacagcctcagagcctgaccacctgggtttgaatctcatctttgccatttatttggtcaagtgatgttccctatctgagcctcagtttccccatttgaaaaatggcggtagtaacagttccagcctcacttaactgtcataaggataagtgaaatgatgtaagcaaaagcactgatggggcctcatcatacccacccgagacaggaagcctctctgtggaaagcctgccatggccccttccctctggctttcttctcacagggtcctgccgttgtcctaccaggaagaggcaacacttacagactcactgtggatgcggctgataactctcagcctcccaggactacagagcccctgcacccttccagggttagccaggaagcgccggcccagagaaggagaagctggtctcagggacacacagcaaggctgggctgagccctcacctctgcacatgacctgttgcaaaatcatgtcttcacttccaaaatacttttttcatcaaaatattctagtttctgccttttgtctcagatgccttctaggcagaaatttcacatccatccccatcctgatccgtggacctggccgctcagggctggcacagcctccctccacctgtctctcatctgcttgtctgaatctctgtgatactccaactctctccccgcgtttctgaatctatttctggctgtgtatttacccagttctttccctgtctctttgtcctctgtctccctctctttctgccccttcctgtttttcccactggtatctctttctttcttttctttctttcttttctttctttcctttctttctttcctttctttctttcctttctttctctctctccctttccctctttctttcttctttttcttttttttgacagagtcttactctgtcacacaggctggagtgtaatggcacaatctcggttcactgcaacttctgcctcccaggttcaagcaattatctgcctcagcctcccgagtagctgggattacaggtgcccgccaccacactcagctaattttcgtatttttagtagagacggtttcaccatctt[132 bp omitted]gtctctgtctctgtgcgtatctcttctccctgtatttctctctctttctccctgggtctctggttctgtggctgtgactccatctttctctgtctctctctctttctctgtgtacacagacacacaaacacacatctttgtctttctctcttgtctctggtctctgtttatgtctccttctgtcagtctcttgcatctgtatttttttctgtctctgtctctctgtgtctgtttctctctctgcctctgtcactctttcctcaagtatacacacacacacacacaccactgacaaatatacatatatctttgtctctctgtctctggtctctgtttatgtctccttctatctcttttgtatctatgtttatttctgtatttctctctttctttcttttttttttttttttttttgagacagggtcttgctgtgtcactcaaactagagtgctatggtgtcatctcagctcactgcagcttccacctccgagttcaaggttcaagtgattctcctacctcagcctcccaaatagctgggactataggagtgtaccaccacacccagctaatttttgtatttttagtagagacgggggtttgccatgctggccaggctggtctcaaactcctggcctcaagtgatccacccacctcggcctcccaaagtgctgggattacagatgtgagccaccacgcctggccctatctttatatctgtatctgtctttatttctgtctctgtctctgtgtctctattttttttctctgcctccatctctttttcctcgagtgcacacacacacacacacacacacacacacacacacacacaccgctgacaaatagatgcatacaacctccctcctcccgcatctgaaggaagcagggcactcacctgaaagcaggattcccatccagtggtgtccccatgagtcagcaggccccatgggtcccggcacctgacttcagtgtgccaggccgtctgtcgccccggcttgcacacacagatacagtcctcactccaggtgcagcccctccacctcccttctctcctctcccaccctgctacaaactcacacacacactgcagtaactgcagctcccaggacagacaggggtggtggcaggaaagtaactttgaccccacctctgccctctacccccagggctcactttccttccctgcccagcacaaagagcgggaagtccaggaaccctggagaccgggaactgcgattacgatagtcaatagcaatgataataaaaaacaacaatgaccagctccttgtccccgagagcttaataaccagtcccagtgccaagttcattataagcagccaataaatattaaatgagccggaatcatgcttgtgatatagatcctggtcataaacaaaagctctggagtcagaccggcaggaatctcagactgagcaggactgggggacctccaggaggagcctgacgtggtcttgggagaaggggcagggagggcctcctggaggagtggacatctgagctgaaacttcgagaacatagtaaaggttccatatataaaagttacttaaaaaaaaatctctatgacaagacaagctggtggtctttgacagtgtatagacctagacccagaagatttaacagaaccgaccagctgagggaactatcattaatccatgtatccatccattaatttaacaaatacttcctgaattctcttccttttttttttttttgagatggagtcttgctctgttgcccaggctggagtgcagtggcatgatttcccctccctgcaacctccacctcccaggctcaagtaattctcctgcctcagcctgcctagtagctgcaactacaggcgtgcgcctccacacccagctaatttttgtatttttagtagagacggaatttcaccacgtagcccaggctggtcttcaactcatgagctcaagcaatccgcccgcctcagcctcccgaagtgctgggattacagacgtgagccgtcgcgcccagtcctgaattctctcctatgctgacccctgctcctggtggtactggggacacagctctgactaagacagccccaaccctgttctcacagaggctcacagtccagtgggggagacagaactgtccccagacagtgacaacccagagtgggcagggctgggatggaggaattcaaagggggcgcctggctcagcttcaggatcagggagagcttcctggaagaggggacatggtagctgagacctgaacaacataggggtgagccagggggagcagcatgtgaaaagtttttgaaattggggcacagaaggaaggtcaggtgggtctagaatagaggaagtgagagaggatggatgattcaacaggcggcttagaaaactctggaactgttacttagggtatgaggggcagcttggcattgcaagaaagagatcgtgactcactcagctgcctcgttttgctgccctgcttccgtcttgctcctgctacaggcagtcacaaagtatctgccctgataaagcataaggccgagccagctggctctggagccagagtgcatgggttcaaatcctgactccccgacttgctaactgggtggcctcagcaggtcagctcccctctctagggactactttcctcagctctaaaatggagatgatgcccaggcacactggctcacatctgtaatcccagcactttgggaggctaaggtgggaggatcacttgagcccaggagttcaagaccagcctgggcaacatagtgagaccccatctcaattaaaataaaataaagcagagtagatgatgatgcttttgtctcctaggaagctctgtggttatgagcacttgacctcagtgtgccaggccatctgtcacccttgcttgtggcaccatttacaagcactaggctagctggctgcctgggctggcaagacagtcctttacatcccagccatggttcattgggaaaaatttgtcacccttgcatgcttccgtgtgctccatctgcagactgggagaaatcacagactccccgcacaagacggttgtgaggatcgaatgagtgagtgccaggaaagtgctcagagcaatgcctggcacagcgtaagccatcaacaaatgtgaattcccactggatgtcatgactgccctgcatcataatctcactgcagccctgtgagggggtacgcattcattcactctgttactgctgtggactgaatgtttgtctctctgtcattcagatgttgaagaaatcctgatcctgcacgtgatggttttaggaggcagaaactttgggaggtaatcaggtccctcccaatgggattagtgctcttataaaagggacctcagagagctctcttgttcactttccaccacgtggggaatgcaacaagaagacagcagtctgtcacccaagaagagagcccccaccagaacctgacaaagctaccaccctcatataggccttccagcctccagaactgcatgaaatagctttctgttctttacaaatcacccattctgtggtctgttctagcagcccgaactgaccgagagccactcaacatatatttcgtgagtgtctactgtgcctgttctaggtgctggggacatagcaggtaatgagaccatcagacgaggccaggtgcagtggctcatgcccataaatccaacactttgggaggccaaggtgggatgattgcttgagcccaggagtttgagaccagcctgggcacccctctctacaaaaaaattaaaataaaaaaaaataggcatagtggtgcgtatctgtggttgcagctactcaggaggctgaagagggaggattgcttgggtctgggagttcgaggctgcagtgagccatgatcgcaccgctgcactccagcctgggtgatggagcaagactctgaaaaaaaaaaaagaaaaagaaagaaagaaagagaaagaaaggaaagaaaggaaagaaaggaaagaaaggaagaaagaaagaaaagaaagaaagaaagaaagaaagaaagaaagaaagaaagaaagaaagaaagaaagaaagaaagaaaagaaagaaaggagggagggagggaaggaaggaaggaagaaaggaaggagaaaaaaaaaagagtggggtaaggaatatgattattccatcccatagttaaaaacactgaagctcacagaggtgagatgacttggataaagtcacaggacatctcaggccctggccctcaacctccatgtgcgtgtgcctttttccaagggcccttcgctattccccagccacacctttctgtacacccagatcaatgaacaccaatgtggccacatcaccccgccacgccttcagactctatgggtccctgtactgaaggcgcctgacccagaccagcccagcattcaaggcctctgccacccacctcgttcttcccagaatgtctgaaccttctgaccacccaccttctcctaagccagcttccctccccaccacctctgccctgaggcactctcccctcttcccctcctccccatccaagacaacagagctgctgctggaatggacttcccaaatctgccccttcatgcaaaagcagggtttcctctcctgaaattcccaccaactcacccactcagcccccagggcagattctgttttttgctgccccaaggaaagaaagggactttctgggcccctccctgtagcacaacttccaattatttccaacaggtgaaaataaaccaggtcctctccacttcccacccttacctaccaggtctcagccatgcaggctggctcaaaattgtgtcttcccacgggactgacctcccagcccaggatgctgccctatgactgtgccctcactgaggccattcactcagcaaagatttgtatggccctactatgtgccaggcactgtttcaggtatcagggcacgccagcaaatgaaacaaacagagatctctgcctttatagaaatgacatgtaatgagtgctgggaggggaggagggagacagataataattgagatacgtggaaaataactggctgggcacagtggctcatgcctgtaatctcgacatttcgggaggctgaggcaggaggatcacttgaacccaggagtttaagaccagcctgggcaatgtagcaagatcccatctcaaagtaaataaataaatgtgcttttttaaacatttaaaaacatgaaaatattaaaattaatttttttttaaaaaaattagaaaacgtagccagccacagtggctcatgcctgtaatcccagcactttgggaagctgaggtggaagaatcacttgagcccaggagttcaagaccagcctggacaacatagggagatccccatctctacataagatcaaagttagctgggtatggtggtgtgtgcctgtactcccagctactcagaaggctgaggcaggaggatcactgcctggagtttaagaccagcctgggcaacatagcaggatctcacctcaaagtaaataaataaatgcttttaaaaaatttaagaatgcagaaacattaaaaataaaaaaataataattaggaaatgtggccaggcacagtggctcatgactgtaatcccagcactttgggaggttgaggtgggagaattgcttgaacccaggagttcaagaccagcctgggcaacataaggagaacccatttcaacacaagatcaaaaagttagctgggtatggtgatgtgtgcctgtactcccagctactagggaggatgaggcaggaggatcacttgagcccaggagtttgaggctgcagtgagctataatcatgccactgcactccagcctgggtgacagagtagctgggattttgtctctaatataaataaatgaataaataagtggaaaattactaaactatctatgatgttggaaagtgatgtgtgccatgggggatgagggcaggcagcgtcagagtgccagagtgggcacgcaggattcaatgctaaagcaggcagtctgggtagccccatggagttttaagcaacgacttgaaggaggtgagagggcaaaatgtacatacatttggaggtttctaagaattaattcacttctgaaaaaaaaaaatgcaggcagagtcccaaggagccattccctgcctcctgcatttaaataactgagttttctatctgctgccacaataaatgcctccagacttggcagcttaaaacaacataagtttatccttttgcagttctgtagatagaagtccaggatggctaaatgacttctctgctctgggctttatggagctaaaataaaggtgttggcagctgagctcttaatgggggagctttgggaagaatctgcttccaagctgtcattcaggctgtggttggcagaatcaaactccttggtattataaagctggaaacctgtttctgcgatggttgccagctgagggctgcccttagctctggaggcctctctcctgtccttgcctttgagcctgtacatctcagagccagcaacgccacaacaaatccttctcgggcttgggatctctctggattccctgtctgctgcatctcttcacaattttttttttctttttagagacagggtctccctctgtcgcccaagcagtggtgcaatcatagctcactgcagccttgaactcctgggctgaagaaatcctcctgccttggcctccaaaagcactgggattacaggcatgagccactgcaccaggccctctgtctgccgtgtctctcttctgcttccagctggggaaagttatctgctttgaagggcttgggtgattaggttggacccaccttgataatccaggataatctccttattttgaagtttgtaactgtattagtccgttttcacactgctgataaactgagcagcttacaaaagaaagagatttaatggacttacagttccacatgacgggggaggcctcacaatcatggcagaaggcaaggaggagcaagtcacatcttacatgggtggcagcaggcaaagagagagcttgtacagggaaactcccccttataaaaccatcagatctcatgagacttattcactctcaggagaacagcacaggaaagacctgcccccctgattcaattacctcccaccaggtccctcccacaatacacgggaattcagatgagatttgggtggggaccacaaaacctaaccacatcagtaaccttaattacatctgcaaagtcattttgcttttgtaatgtaacatattcacaggtttgttcattttttatggctgagtagtatttcatggtgaatatatatcacaggttccaggaactaggatgtgggcacctttggtggggggtcactattctgcctaccataatgacatgatgtgaaagcaggaatgtctagagttcaggcagccattctgagaccatgaagtagcaagttcagcaggatatgcaatgcactgagggtggagggatggatgagaggatatcactgagccatagaataaacctagggcatcttgcaaaatgacaattatgatttttgccgctgtgatccaggttgtcttttgtttgcagctgaatgcattctacctggctcctttccagatcaccattggaagtgtttattggaagaccttgcatcaaaaccctgatctttcagaaacatagagtttgtagtagtgttctttttcttaaagtgtgctaaaacttgtaaaatcgactttgagaaagagcctactcaaaattactcttctgtttaaacagagattccagtctaagctcccttttatcccatatggggaaactagggcccagagggtacagtgaagtttttctccagggtcatagaactgagtcttcttggaacatctgggaaactcagttttgtaccgttgactttttgtgcttttcctgtgtacaagaagcaagatcagtataaatgggaaaataaataatgcagatccaggtaatagaatcccaacatctcatacccaagaacccctacacacacacacacacacatgcacacacaacacatcatcatcatcgttgtcgtcatcgtcatcctcatcatcaccatcattatcctgccccctgcagcctctacaccatacttgtttccatgactccttaaattcctagaatggcacagaaaacagacaaaagattagctcacagatgctattttattaaactcatgatgcccactgacatagaaagggacatatgttttctgagtcatggttcaaaggagtaaactttcccagaagcttctccagctgagatatcctcccctcaccaatataacaatttcactaacactctcccacttctacccactctgtcatcataagcatccacatcccactctacccagtcagagctatgacttcttcttctagaacttgggacaccaccaattagagagtaaaatactttggatcttccaagtaacctgcaggatacttttttttctttttttttttttgagacggagtttcactctgttacccaggctggagtgcagtggcacgatctcaagtcactgcaacctccacctcccaggttcgagtaattctcctgcctcagcctcctcagtagctggaattacaggcacccacgaccacacccgactaatgttttgtatttttagtagagatggggtttcaccatgttggccaggctggtctcgaactcctgacctcaggtgatccacccaccttggcctcccaaagtgctgggattataggcgtgagccaccgtgcccagccacctgcaggatacttttaagttcacctcaagatcgtgcattaacaattttgtaaggtgcttagctcttgtctcactactaggaagaaaagagtgtccaatcttgcattatcaagccagccatgaaaattccatttaagggagatggtggggacaaagaagcatggatgagggtcagacagagttctgtggtaggaaagtgagaggctcccaggagctgaaggatgttagagatcaactgatgacatgaggatattagctaatgctgccaaggactctgtacagactcctcagcctcccaagtagctgggattacagacacatgccacggcacccagctaattttttttgtagcgtttcagaggggagtctctctatgttgcccatgctggtctcgaacttgtggcctcaagcaatcctcccatctcagcctcccaaagcactgggattataggtgtgagcaaccgtgcctagtctgaactgtgaatttttgaatgcaaaagctgactgagctacttgagccacagcccttagagagttacacataatatgcaaagaaggaatgcaacataagaaagggtattctacatcataacacttctttttttttttaaattttttgagacagagtttcgctcttgctgcccaggccagagtgcagtggtgccatcttggctcaccgcaacctccacctccggggttcaagcaattcccctgcctcagcctcccgagtagctgggattacaggcatgtgccaccacacccagctaattttgtatttttagtagagacgggatttctccatg[139 bp omitted]tgaagctacaaggtaagtcctaatcatcatgcaatcccctgtctaaagcatttttgttttaaaaaaggaaagagattggggagtgattacaaccttctacctttcaatgaagatcacctcaaatctgttaaaatagctggctcagtgtctctttttggccttgggaggagttgaaatctctggtcagggtgttgaagactggtcacaatgcagttgacatctccatgcctctggaaaatatgaaaccttgctcaaccctacccaagaaagggactttctgttctggcctccatagccagaaacgcctctgcctcccccagctgtggaaggaatacttgattcccaactcagggtcagctgcccttactctctgctcaattcctcttttttctctgaaacaaaatatttgggcatctttctcgataccctcctttccctaaatcacctccaacatccaatcaatcaccaactcctaagggttccatctttgaaactcattaaccttcttttctgcccccttttctccatccgcatgaccttaccctaggcaatacctccatcttctctcgcctgtaaaactgctctgagttccccaaccctgacccccagcctccctgtcagtatacttaacccctccaacatgcccaccacaattctggccacctttccaaatcccagctctgaattagagtctctctctctcccctctaaacagagaggctcaaagaccctcagctgaccctacaagaagtctgggatgctgccattctttcctggtaaatcccctcccatgatcccttactgtccacagggtgaacatctaattcttcagtctggcatctgaagcttctgaagcatctggaggtaagtatttcatccttaccttgctgagctgaactccacaggattcctgggctggagagaaggaaagaagagttaagtcccaagaggcgagtggaaaaggtgtcttcctctgcagctaagccaatagcaggctgtcttcatcccaccttctgaaggagggaaagggggcaaaaagttgagatctctgcttcctaggcgagcccgaggtcccagagaaccctgaaggtagagcaaacctcgtgttatcatggtgaataatattggcgtccatcccaggaaactgagctaatgctctctgcccagatgtgcacagggatgacacaccacgagcgatcttggtcccatcccacccctattctgctccaggcttcaggtagcacagtggttaaggacccagactctacagtgagagagaaatgggttcaaagctcccccagctcctctgctcaccgtctatgtgacctcgagcatgagacagagcctctttaagccccagtttcttcttctgcataataggtgtaaccctagctcctccctcctcgatgaaatgaggagacgctgaatgcagtggctcagcagagggtgaaatacagcaagcccacaggaaatggggctgcagtcatttgtctttgcacaactggtagtaggatggagagtggacgctcaaagataccaggtcctaacccttgcaacctgtaaatgttacgtcataaggaaacaaggtttttgcagatacaattaaggatcatgagatgaggaggtcatctagatgatgcgagtggacagtaaatgtcatcatgagtttcctcattaaagagtagagggagattggacacccacagaggagaaggcaatgtgaagagaagcagaaggtgacccggacacaagtcacagaatgccaccagccagcagaaacatgactgcagcagacccagggtcccacgcccagaaacctccagaacacctcaagggaattgtaaaccagcaagagatagctttacatttttttttttttttttttttgagacagggtctcactctgttgcccaggctggaatactgtggcatgatcatggctcacagcagcctcaaactcctgggcccaagcgattcgcccatctcagcctcttgagtagctgggaccacaggcatgtgccaccacatccaactaattttttgtatttttggtagagacagtttcaccatgttgcccaggctggtctcgaactcgtgagctcaagtgatccacttgcctcagcttcccaaaatgctgggattacagtagtaagcctctgtgcccaacctaggtagtgatatttatgattagccatgccataattataatatgatattatacctagggtttagcggacactatataaatgttagttgtaactaataatggttattttaacaatattattaatagacaaatttagttaccatttacatatacagacattagctaagtcctgatgatgccggtgaattgtctccacaactataaggtaatggctacctttatccccatttcacaggtgaggaaactaaggcaatagtggttaggacacccttccaaggttgccactgcgaggagctggtgacagaggggtttgaattcacttccatctgactcaagagcccaggatcgaactcaggacaaatgggtggtgccccagcgccagtgctgactgccagttcctgagcaggttcttcccctgcaggcccacccactggtcctcagtgcccctggtccctgccagtgaagtttgcagctcccagataagtagccccctctgggatccccactcagtcctggctccgtgacctctgaggggcccagagctggtacctgggaccttatgaccccaacacagtagccagcagtccctgtgagcaccacgctgatcaggacactcgaggcaatccctgcgatgcctccagcaggaatagtggtcctgagtaaggccggctgcagttcatccccaggaacctctgcaggaaagagagagagaaggagaaagagagagatagaaagagagagagggagggagaggaagagagaggtgtcagtgctggggctctgggtttcaggtcctcagagctgttccctccatgtgctcaattcgaaccctcctctccccccattttacagattgggaaactgaggcccagggaaaggaagcgtctgtaccagataataaatataacactcacagatgacaggaataatgtctggtaaactatattatctcatttattcctcaagacaaccctatgaggaaggcattgttaatatccccattaaagaaacaggcactgagaagttaaactacccatccaccatcacacatggggtagagttagaatttgaaacatgttgatgccagagcttacactctgaacctctgcactatgtggcctctgaggatcacattcatccattcctcattcaacgaacatttatttagcacatactgtgtgtgccagacacctttttaggcactcgagggatattgcagaaaacagaacagacaaaattcctgatgtcctagagcttacactttaggagggaactgagacataaaacacacaatgagggccagg[138 bp omitted]gtggcacgtgcctgtagtcccagctactcaagagactgaggcaagagaatcatttgaacccaggaggcggaggttgcagtgggtcaagattgtgccaccgcactccaccctgggcgacagagtgagactctgtcaacacacacacacacacacacacacacacacacacacacacacacaatggagcaaatatataaagtgatgacaagcattataaaggagtagaataagatgctattcgaggatctcacaggaggaccagacttagtctggggaaatcagggaacgcatcctggaggaagtgacatttaagctgagatccaaaagacaagtccaagatcagctggtagaggggttagtctcctgagcaaagtggccagcattcattcattcattcatttattcattcagcaagctgttctaggcactgatgatacagcagtcaacacaacagacaaggtctcaaccgtcacagatctggccacctggatggagagattgatgataaataattaggccctaataataattagggcctggcatggtggctcacacctgtaatcccagcactttgggtggccaaggccagtggatcacctgaggtcaggagttcaagaccagcctgaccaatatgacaaaaccccgtctctattaaaaaacatacagccaagttcagaaggaccacccaactgacctgcagacttacaagctgtaacaaattcttattgtcttgagccactgggtcttggcagggggggcattttatgcagctttgttgaggtactatatgattgacccaagccccagaacccacttatatcaggcaagagactctgagccattatcaccacggcatctcaacacccacctgagatccagatcttcccattgactgagctgcagaggtgagtgatgctgttggaggcctcacaggtgtacctgccctactggtccagagtgacctcagaaatgaccaggtgctgggtggcagggcctggccttctgtccatctcccagtggtactgggcaggggggtttgagtcagcaaagcaggacagggtgagggctgccccagctgtgacctctgggtctggagggttgaccataggagggtctgggccatctgcagagaattgagaagaccaggccagagggaagaggaaaggcctttgtccatattacaatgcattggccattgtctcagatgacactcttccatccccctccagtgcacaactgcatttgacactgttggccatctcccttctagttgctttcttgtcccctaccaccaccaccacctccccataccatattctctacttctactgtgcagctagaggtatccttttcaaagcttgttcaaacctgcgtcacatcatgtcccttctctgcacaaacccttctttggctgctgtctcatgcagggtaaaagccaaagccctcatcatggcccacaggccctgcacagtctgtcccattacctctcttggggcaagacagtcctcttcttcctcactctccttcttccctttacttcagccactatgacctcctctctcaaaaccacactcccaccccaggcttggcatttgcagtctcccttccacaaaatctccccttggtgccctctctcactttgtccaggacagacacttccagctttgccaacagaaccagctaaacttcagccgctccttcacccctcaaccacactcctatgcacatctccacccatcctttatcaggtcctggactcacatgtaactttgatgagagtggggttgctgatgctgctggtggctgagttccagctctcacactggtagacccccgtgtcattcctggtgatgttcgacagagtcagtgttctgcagtccagggacagctccctgtggccaccaatgaagagcttctggccattgacatcccggcggatggccacagtgctccttggaggaaggcaatgcagactgatggaatccacatgctccactggggctaagttactggctgtgacattgggctgaggaagtgtctctgcaggaaaattagaaagaggtagaaatgctgagtcctgcccagatcatgggcttagagaagaacacccttagggaacacccttagggctgaaggaattcagcacacttgccaatcatccatccatgcacctgtccataagtccatctactctccaccaactcagcctttcctacattcattcacccaattgttcactcttccagtcacccttctatttatccatccaccaatttgtccctcaatccacccatctatccatccgtcatccatccatccatccatccatccatccatccatcctatccataaatctaccttcccatctacctacccacccagggatgcatacatgcacccatcttctcaatcattcaccatttttttcacccatttgtccacccaatcatcttttccaatcacttaccacccacctaaattcgctcatccacctatcccttcatttacccaatcacctattcattcatcacccaatcacctattcattcatccaccaatccatccattgatcttcccttctgtctgtttacttaataaattaacacttctggagcaccaaatatgccccaggctttgtgctaaatgctttacagacacaatcttatatcctcatgcttatatttcaagagaagggtggattttaacccatttcacaggtgataaaactgagcaaacaataaaaagaaccttcatcaattgagtacttaatttgtcgtagatgttttatgtgtgtgattcattagacttcacaacaaccctgtaaatccccatttgcaaaatgaagaacctgaggctcagggatgatccatgactaacccaagatgaggacattgatccatgggggcaaatgggattcatgctgcccatctgcctgcctctttcctttctcgctgacctgcattacacccagggtgatctcccacacagctgagttgtaccctctgtagctcctacgaatcacctggatgttgagatgcactgtgctataacatccttttattctcctaagtcataatcacaccatacaaataagaaaaggatctcagaagggtaaccattgaaagcaaaaattttcatccctaaataacttttataccaatatttttaaaaatttggagcaagatagcacaactcttctttataaaggaaaatacatatgcagtaatttataagaaatagatactggaggccaggcactgtggctcgtacctgtaatcccagcactttgggaagccaaggcaggcggatcacctgaggtcaggagttcgagaccagcctggccaacatggcaaaaccccgtctctactaaaaacacaaaaattagccagatgtgctggtgcacgcctgttatcccaggcggctgaggcagaagaatcacttgaacccaggaggcagaggttgcagtgagccaagatcatgccattgcactccagcctgggtgacggagtgagactttgtcttaaaaaaaaaaaaaaaaaaaaaaaaaagagagagagaagaaaaaaaaaaagaaataggtactgggaatgaacctgtaagagggtataacaaaatattagcagtggtcatttctgagaatgtagagtttttacccttttcctttttaaaaatatttgtattggtaatttctcttacactggatatacagtatgtattcaataaagaaataatcagaatgtaggatgtaatgtggctctatattaattaacagaaagacattaaagattaaaagatgaaatttaaaaacagtttaaacaataataagtatagtctaatactatttgttgtttaaaaatacatatatttggccggccacaatggctcacacctgtaatcctagcacttttggaggccaaggtggacggatcacttaagcccaagagtttgagaccagactgggcagcacagcaagaccctgtctctacaaaaaggacaaaaattagcccagcgtggtggcatgtgcctgtagtgccagctacttgggaggctgaggtgggaggatcaattgatcccaggaggttgaggctacagtgagcaaagatcaaaccactgcactccagcctggcagacagagtgagaccctgtctcaaaaaaaaaaaaaaaaaagaagaccacacacatatatttgaatgtatatacaaaaacagaggaattatagaagccctgtggctttttctgggaggcttattgtggaaaacattttttgccttcttgcccatctatatgatttactttttctacaattattgtgaaatttatttaaaatgtgaaaaaggtggcatataatattttttttttttttttttttttttttttttttaagtttccttgtattttgaattctttttttttttttttttttttttttttttttttttattatactctaagttttagggtacatgtgcacattgtgcaggttagttacatatgtatacatgtgccatgctggtgcactgcacccactaatgtgtcatctagcattaggtatatctcccaatgctatccctcccccctcccccgaccccaccacagtccccagagtgtgatattccccttcctgggtccatgtgatctcattgttcaattcccacctatgagtgagaatatgcggtgtttggttttttgttcttgcgatagtttactgagaatgatggtttccaatttcatccatgtccctacaaaggatatgaactcatcattttttatggctgcatagtattccatggtgtatatgtgccacattttcttaatccagtctatcattgttggacatttgggttggttccaagtctttgctattgtgaatagtgccgcaataaacatacgtgtgcatgtgtctttatagcagcatgatttatactcatttgggtatatacccagtaatgggatggctgggtcaaatggtatttctagttctagatccctgaggaatcgggtggcatataatatttttaaagcaatcctatcaatgaaaagtcattttgttggttaaagaatgtaaaaatttattctgcataacacaggttagaaaaatcttgctgaatatataaagaagtgaaacagcaaagaaaagaattctaaaaaacaaaaccaaacccaaattcgccaatgaagtcctggggcagagaagaatttttctcttatttttttctttttcttttttttttctttgattttgaagatttcaccattaaccaatcaccctcaaccctggcttcatacctgagacagtgatgatggtgtccatactgctgtgcaagccggaaagggagttggaggccttgcaggtgtagacccctgagtgtgccctggagagactgggcatgaagagggtctggccctcccatgtggtgaccccactgaagctccatgtgtactgggcaaggaggtgggagtaggctaagcagaccagagtgaggttggaaccaatcacaaaatctgggtccagtgcggtcatgatgggggtatccgggccatctgaacaaggagaaagacttcctaattaggaagagtatgagaagtaaggaccacccccctagattgtgcatttcagctcagtgttggaagcctgacatgttgagggaggcacacagcaccacaacgtaaaagtttgtcagaggaaggaagggagggaggggaggaagggagggagggagggagggagggaggaaggaaggaaggaaggaaggaaggaaggaaggaaggaaggaaggaaggagggaaagaacaaacgaaccatggctggcggtagcctccctcttgtgtctattaccctccttgatctttgaagactgtcagctccatgaggacagggatatgcttgtcagttatgttaactgctttgactagaaataacacccaatacacacagcacacagtggatgctcagtagatgctttcccaaaagtagagagacagaggggcagagagagaaaaacacatgggttcaagttcttatctttcttcttgaccacggtgagatcttgggtgagcccttcccctttcttaatctcagttttcttgtttgtaaaatgtggtgtctctgaaagtccttccagttctgcaaatatttatgttgtcgagtctggaatttctgggatcttggcttcctacaatctccatctacctttgtacctgagattgaatgggtctgaaagtccttaattgggtacatagtagaagctcaatacatgccccttaaataaataaatgatgataaacttctgagagaatagtcattgtaaacgtctattaagcacttagtgtgcagagtagtggaaaagaataaagaaaaaaagagaaaaaaagaagcacttgctatgttccaggcactattctaagttccttaaatgaactaactcacttaatcctcataatcacccaatgagatagataatattatgattctcactttgcagatgagaaaactgaggacatagaaaagtgaagtgacttgcccaaggacacctagctaagaaatagcagggacggctgggcgcagaggctcacgcctgtaattctagcactttgggaggctgaggcaggaggattgcttgagcttaggagttcaagactaggctgggcaacatagtgagactttgtctctaccaaaacttgtaaaaattagccaggcatagaggcatgtgcctgcgatcccagctactccggtggctgaggcaggaggattgcttgagcccagaagggcaaggctgcagtgagctatgatccagccactgcactccagcctggacaacagagtgagaccatgactcaataaataaataaataaaagaaacagaagcactaggatttgaaccaaggcagtctgtagagtctctgatttaaacgctaagctataaatcatggatgaaccagtagatagttgggctggaggttctgtgtggatcagaggtgagtcagagcaaagaaacccagacttacaagccacgccaaccacgagggcttcactgagcctggatcccaggtggttcctggcctcacagtggtaggtgctggagtcattgcgtgtgactgtggggatggtgaggaccctgccatctctggagattactggtccatccccttcctgaatcacctcaaggttcagaaaccactggaatgtcctgtcattgtttggagaaatgcatgtcaaattcaaggagtctgtgtgctccagaggggccaagttctgggcttccaccgggggctggtgcagcttctctggggagaaggaaagagaaagaatggcgttataggacatgggaggatctggaaccctaggaatgatcagcagcacgaataggctggggaccttggaaacaccagcgttggctttgctgtttccaagatgaccaataagcacacacacacacacacacacacacacacacacagccaacagctctacttccggaagttcttaactgtctagagatcccagatcctctccccagaaatacacccaataacacacacaccacacaaatacctacacatttgtatataatttcaaggggttatggggcactctaaagaccaactttagatttcaagtgaggaatcttatacctagattacaaattagtaaatatctttcttttttgagacagggtcttgttctgttgcccaggcttcagtgcagtggcactaacacggctcaccatagtctcaacctcccaggcacaagcgatcctcccgcctcagcctcctgagtagctgagatccatgcatgtcaccatcctcagctacttttgaaaaacttttgtagggtggggtcttgctgtgctgcccaggctggtctcaaactcctgggctcaagtgatcctcctgtcttgacctcccaaagtgctggcctgacaggaagtaaatatctttcttgaagtcaacttagaaatacaagttgaaagttacacatgtttatataacttttgacccaatgattacacttttaaaaacagttttattgaggtataataagcaaataaaaatgttgtatgttcaaagtgtacaacttgatgttttgatagttgatctctacaatcaagctaattaatatatccatcaccggctgggtgtggtggctcaggcctgtaatcccagctctttgggaggctgaggaaggtggatcacctgaggtcaggagtttgagaccagcttggccaacatggtgaaaccccgtctctactaaaaaatacaaaaattagccaggtgtggtggcacgcacttgtaattccagctacttgggaggctgaggtgggaggatctcttgaacctggatggtgggggttgcagtgagccgagatcataccacgacactccagcatggacaacagagtgagactccatctcaaaaaaatgaaaaaaaaaaaaaggaagaaaggaaaaaaaactgctggatgcttgcttgcattgcttccattgcttgcactgcaagcattatctcatgtactactggtaccaccctgtgctgtaaggactattaatatcccattttacaacaggtaaactgaggtttatgttgggtaagtgagttgtgaaaaaccaagttgtaagtgggtgaatcatttttaaactcagggctatgtgactccaaacttcataaccactgtgaaataaatactatgtagaaaaatctatttttaaaaaatctcagaaaatgaagcaggcacagttttccctattccatcccgagcacagttaaaaaccttggatattatcacttctacactgctggtgggaatgtaaactagtacagccgttatgaaaaacagtgtggagattccttaaacaactaaaagtagaactaccatttgatccagcagtcccactactgggtatctacccagaggaaaagaagtcattacacaaaaaagatactcgcacacgcatgtttatagcagcacaattcacaattgcaaaatcgtggcaccaacccaaatacccatcaatcaacaagtggataaagaaactgtgatatatatatatatgttcatatatacgttcatatatatatgttcatatatacgttcatatatacgttcatatatacgttcatatatatacgttcatatatgcgttcatatatgcgttcatatatatacgttcatatatgcgttcatatatatacgttcatatatgcgttcatatatatacgttcatatatacgttcatatatatacgttcatatatgcgtttatatatacgttcatatatgcgttcatatatatgcgttcatatatatgcgttcatatatacgcgttcatatatacgttcatatatacgcgttcatatatacgcgttcatatatacgcgttcatatatacgcgttcatatatacgttcatatatacgcgttcatatatacgttcatatatatacgttcatatatacgttcatatatatacgttcatatatatacgttcatatatatacgttcatatatatacgttcatatatacgttcatatatacacgttcatatatacgttcatatatacgttcatatatacgttcatatatacgttcatatatacattcatatatatgttcatatatacgttcatatatatgttcatatatatatatatatatatatatatatatatgaatgatggaatactactcggtcataaaaaggaatgaattaacaacatttgcaatgacctggatgagactggagactattattctaagtgaagtaactcaggaatggaaaaccaaacatcatatgttctcactgatatgtgggagctaagctatgaggacacaaaagcgtaagaatgatacaatggactttggggacttggggtgaagagtgggaggggagtgagggatgaaagactacaaatagggtggagtgtataccgctcaggtgatgggtgcaccaaaatctcacaaatcacccccaaagaacttactcatgtaaccaaaccgacctgtaccccaataatctatggaaaaataaataaaataaaataaagcaatagagaaaaagcctcaaaaatatgaacagaacatcattgttctatgggaataatatcaagcagtctatcacaggtgcagctaaagaatgaataaataaataaataaataaataaataaataaataaataaaaatagatgactcggaaaggaggagagaatatggcagactggctgcggatctcaagaccggagaaagcacatggtggtgagttttctggactttctttgcgcctcacagatcccagactgggagctggagagcctggcaatctagaaatgccaatgagtgtagatccaaaagaggctcaagcaaagcctgctctagccaaaggacaaggagcagtagcctgacaagatttgctaaagacagcaaatctttacaagataatcactttgctgctgtgatatcccacagaaaagcctggacatttacccttgccagctgtacagagacacccatcccctccaccaggctgaataagcagctgggactgtcatccttgcccagcagtaatgagcaccgaccctgcagtgtccattgaggccactagggagcggtaacgaggcgtctctgccccttctgggcaagatggtatcagaggatgtctcagtggaaagcctgaactctgctaactgcccagagtaacagttgccccgccccacctggaatgtcaacagaggccaaatggggaacctggacctccatccccactggctataacaagatggtgccctttttgccccaccagcaagatgtcagaggagacctgctataacagaagatttaaatgagatccagcgtctcataatttccaaaatgtccagggtgttgttgaaaatcacttgtcatacacctacatgtaatcccaatactttgggaggccgaggtgggagaattgcttgagctcagaagttcgagaccagcgtgggcaacatagtgagaccccatctctacaaaaaaaaaaaaaaaattgactgaatgagaaagacattcctgaaattaaatgaggaaagacaattaatagagatgacatggattgttgttgatgttttctaacttggtcttgagttttctaggggatttagttgtagatgtttaaagtgtaattttcactggttacttctttatcttggtggtcggcctaatgcctacatgtctgacctgtgaccaggtgtccctctcacagtacacttattttttgtgtgtttgtttgtttttgagacagagtctcactctgtcacccaggtcggagcgcagtggtatggtcttggctcactgcaacctccacctcccaggttcaagcaattctcatgcctcagcctcctgagtaggtgggattacagacatatgccactacacccaactaatttttttttttttttaagtacagacggggtttcaccatgttggccaggctgatcttgaactcctagcctcatgggatcctcccaccccaacctcccatagtgctgggatcacaggcatgagccatcacacctggccacagtacacttgtttataatggcagacattcttaaggcttttgtctgacctgtgtccagtttatttctacaaagagagccatgctttaggacagccctgaccaggaaagacgttaggtttggatgtgtcagtcaggtgagacacagaggaggcagcacaacaaaacacatgaaataacaggggcagtttattactcacagattccggagaagacagagcagcacatctcacagagccaacaggaagaagagagttgtcgggacacgcacactcaaccagcgggtggggagcaagaaagagaaagtgagagacctgtgggctgatgcttttattggagtctaaggaaactgctcaggcagttttccacagagaattctaactgggtttagagccagcaggcacaagttgcatggagtcacactgactgggaggtgatcactgtggcatatctgcacagcctatgcagggtctgggggtcagggggacagtcaggtgagttatatctagctgttgcataaggaggtggttaacaggaagtggtagtgtaaggcaggtatctggatctgccacattaaggatctggggggaggcggagacctggaaactgtgtcaagggtgactaagcttttcttatggtatgagaaagtccaacttatattcaaaatagatactgagccaggcacagtggctcacatctgtaatcccaacactttgggaggctgaggcaagaggattgcttgagctcaggagtttgagaccagcctgggcaacacagtgagacctccgtctctacaaataaaatttcaaaaaattagctgggtgtggtggcatacgcctatagtcccagctacttgggggactgagatgagaggttcacttgagcccaggagctcgaggctgcagtgagccgtgattgcaccactgcactccagcctgggtgacagagtgcgaccctgtctcaaaacaataacatttcaaaaattgatactgagtttctataaaattgtaagaattcactacactgatgttagaattgtcttaaaagaatcttagagcagccaacataaaaatgcttcaatgaacaattacaaacacttgaaataagtgaaaaaccagaaagtctcagcaaagaaatagaagatatgaaaaagaacaagacggaaattttagaatggaaaagcacaataacagaaattttttaaaaacttaatgtttgagcccagctgcagaatggagatgacagagataaaaatcagtgcagataaaagttaccaaatctgaacaacagaaagaaaatagactgataagaagtgaagaacagaactttgggacctgtgggactttaacaaaagagccaacattcatgtcattggagacccagaaggaaaggaggaagtgggtataatggctggtttcccaaatctggtaaaagacatacatctatggaatcaagaaactgagtaaaccccaatgccagcgtggtaatcaggattctaaatatagtccttccagatttctgttcctgattgttcaatcaaatgctaatctaggtattgctttgaagggattttgtaattaaagctcaaagtcagctgatcttaaaatacagatcatctgggtgggcctgacctgatcaggtgactcttttaaaagcagatcagatgagaaagtcagagaatcaaaacacaaggaggattcaatgcatccttgctgtctttgaagatgcaggggtcaatgtgtgagcagggtagagtggcctgcaagagcttagagcacccgcagatgacagccagcaaggaaacagacctc[298 bp omitted]ctgaatgagcttggatatgggttctttcccaaagcctacaggtaaaccccagccaactcacatcacaccttgattttgacctggtgagagaacccagttgaggacacttggacatcgaggtacagaaactgaaatagtaaatgttattcactctcttagttcacccagaatcagactctgcactagaatgtaagtgcaattagtttattatttatttatttacttttttggagatggagtctcgcactgtcgcctgccaccacgccaggctaattttttgtatttttagtagagacagggtttcacca[137 bp omitted]ggaaagtaagtaagggaaaagaaggaagccatatagaaaaattagctctatagaaaactggagctcacctctgaaaactggtacaaaacacacctctgagggccgggcgcagtggctcacgcctgtaatctcagcactttaggaggctgaggcaggcagatcacctgaggtcgggagtttgagaccagcctgaccaacatggagaaaccccctctctactaaaaatacaaaattagcccggcgtgctgtcacatgcctgtaatcccagctactcaggaggctgaggtgggagaatcacttgaacctgggaggcggaggttgcggtgagccaagatcgtgccattgcattccaacttgggcaacaagaacgaaactccatctcaaaacaaaacaacaacaacaaaaaataaaaccacctctgagttgttccccctaagttcaggggaatatatctaccaattccttcttggtgttagttaatggtcactcccaggatgttaatttctctgacattttcagcctgccctcagttggggcttgcatcctcttgtactcagagaaatcagagaggcacagacactcatggaaggggttgcggaagtactcaccactctctttcagtcatttcgagaatttctcttctttcatcattcagtcgtcctaaaagtcctgtgtgtcaataataaattacacccactgaaaggaagacgtatatttacatttcatggcctttcattttctattagtgtccccttcattccactccatcttattattagaatgattctaccagtgtctttctggaaaataggtgtaggaataaatttattctaaaaaataaaacaacatctacgcaaagaggtcttaaaaccttcataattagctctataaaacaattaactccaagaagtaatgctgaatgctttccaaatgcatactgacagtaagaaaacattatcaaatacccacatttgcattttttctagacatggttacagacctaaatccctcagttgatcagcttgagggaccaaataaatctctgttatcggtatagcaacagcacttacttgttttgtagcagtcagggcataccaaagtaagatcaaagaaaaaatagaatctcacgaaatatattttctcaaggtaaaccctcaccaaattataattgaatgattagtctggtataattttagtagaaaaattataggaaaaaaaagacaggacaaaatatgataattgagttggcaaagatcaactcctaagcagctaatttagtgttcaataaaacccaaaaatgcagaagcatgattttcccatttatagtatgttcacatactataaatgagttattttaaccaatttagaagtaagacctggccaggcatggtggcttacacctgtaatcccatcactttgggcggcaagacaggtggattgcttgaggccaggagttcgagaccagcctggccgacatggccaaaccccgtctcttactaaaaatatcaaaattagctgggcggggtggtgcatacctgtaatttcacctcctcagaaggctgaagcatgaaaatcatttgagcctggaggcagaggttgcagtgagctgagattgcaccactgcactccag[132 bp omitted]ccagcctggccaatatagtgaaacccgtctctactaaaaataaaaaaatcagtcaggcatggtggtgtgtgcctgtaatcccagctactcagtaggctgaggcaagaaaattgcttgaacccgggaggcggaggttgtagtgagcagagatcctgccactgcactccagcctgagcgacagagcaagactctatctcaaaaaaaaaaaaggaagtgagacataagtattgtattgtatcatgataaagcaattatttggcattacaccttaatgaattttatccagtcaatttgcctttgtagacacagagtgattcatgtaatatgatatgtagcataatcaagtttaatctctgtaataatggttgtttatctgtaggctatagttgtaaaagaagaataaataaataaagcaatctatcaatcttgatcaaacaatgtagcccacagttgattcagatgttacaataatgtagttggtacaactcactgggcagcatataccatgagcactaatgaaaaataaaaatcatggcaaggcgcgatggctcatgcctgtaatcccagcacattgagaggcagaggtgggcggatcacctgaggtcaggagttcgagaccaagctggccaacatggcgaaatcccatctctactaaaaaatacaaaaattagccaggcacagtggctcatgcctgtaatcccagctacaggggaggctgaggcagaagagtcgcttgaacccaggaggcaaaggctgcagtgagccgagatcatgccactgcactccagcctgggcagtagattgagactctgtctcaaaaaaaaaaatgaaaaatgaaaaatgaaaagcaactgcatgaaagtcaattcagtttatgcctagccttcattaaagaccaacaagaaaaaataacaaaaaaaaacaaaaaataaatgtttcagtgaaaatctcatttgggctctcatctacaggacagagtgtagatggaaaatacatgtttgatgtaataactgatcttgtgatatacctttatgattgtaaatagttgatatattaagaaataatagtaaaataaatgttattttaagcctccaaatttgtgataattttgttaggcagcaataaataataaaaaaaaaaactaatacacccaaacagaataaacccaaatgaatctatgccagggcatatcataatcaaactgttgaaagctaaagatgaatttaaaatcttgaaagcagtgaaagacaaatgataccttacccataggaagaaaacaatttcaatgaaagtagatttctcatcagaaactatgaaagccagaagaaagaagcataacattttataagttctaaagaactgtcaacccaggattctataaccagcgaatgaaaaagatgtacatttatatgtatacatataaaatatgtatatatgtatataaatgtatatacatttataggtatacatataaaatatgtatatatgtatataaatgtatatacatttataggtatacatataaaatatgtatatatgtatataaatgtatatacatttataggtatacatataaaatatgtatatatgtatataaatgtatatacaattatatgtatatattatgtatataaccattcaagaatgagagagatgtacattttaaaataattaaaagaggccgggtggggtgactcactcctataatcccagcactttgagaggctgaggcggacagatcacttgcggtcaggagttcgagaccagcctggccaacatggcaaaaccccatctctactaaaaacacaaaaattaggcaggcttggaggctgaggcaggagaattgcctgaacccaggaggcggaagtgcagtgagccaagattgcgccactgcactccagcctgggtaacagagcaagactccatctcaaaaaataaataaaataaaataaaataactaaaagagttattgaattgtaattgcatttggattggaaattggatctaattgtaaattggatccaagagtaactggattgtttgtaatacaaatgataaatgcttaagggaatgagcaccccgttctctatgatgtgattattccacattgcatgcctgtatcgaaacatctcatgtaccccataaatatatacacctactatgtacccataaaaattaaaataaacaaatttttaaaaataaaataaaaaagaattcaggaaaaaccaacacattctcagatgaaggaaaactaagagaatttgttgccagcagacctaccctaaaagaatagagaaagggagttattaaaacagaaaagaatggtaaaagaagggaatctggaacatcaggagaaaagaaagatagagaaggaagaaaagaaaaggagaaagagggagggaggagaggacagaaaaaggggagaggggagaggaaggggttttctttttcttcttgagttttctttccctttttttccagaggatcttcacacctctaactgaattttctaaattacatttaatagttaaagtaaaaattgtaacactgtctgatgtgattctcaatgtatgtaaagaaaatattaagacaataatattataaatgattataaatgggagaagataatggtattaaagggaggtaaggttttttttgtttttttttttttttaactgtgtcttgttctgttgcccaggctggagtgcagtggcacgatctcagctcactacaacctctgcttcccgggttcaagagattctcgtgcctc[134 bp omitted]tcgatctcccaatgtgctgggattacacgtgtgagccactgtgctgggcctggccctgaggtaaggcttctatattttgtttgaactggtaaaacgtcaaaaccaataggctgtgataaactctatacataatacctacagccattgctaagaagtctatacaaagagacacactcaaaaacattacagataaataaagtgagattctaaaaaaatattgatgtgacccataagtaggcaagaaaaaggaaacagaaaaacaaaaaaccaaaaaacaaacagaagacaaaaaaaatgaattggcagacctaagtcctaacataacaataattacattaaatttaatagcctaaatataccaattaatggatttatatttacagactgtattttttaaatgagccagttaaatgatagccacaacaaaattacttcaaatattatcatacacacaggttgaaaaggattaaaaaaaagatatactatgtcaatattaataaaaggaaagcaagaatggttatagtagcatcagataaagaacagagcaaagataattagcagggacggaaaggaacataatgatagtagagtcgctccaccaaaaagatgtggcaatctcaaatgtgtacacaccaaacaacggaactacagaatatgcgaaggaaaaatggacagaactgaaatgagaaacgcataaactgacaattacagtttgggacatcagcactactctcaactattgttagaacaactagacaaaaaaaaaaatcagcaaggatagaagaattcaacaccaccagcaatcaaggtctaattgacattgacaggacatttaatccaacaacagcgaaatacacattctttccaaacattcacagaacatatactaaaataaaccatgtcctgggctagagaacctcaacaaacttgaaagaattgaaaccatacagggtgttctctgaccacagtggaatccaactagaaataactaacaggaagataagaacaaaatctccagatacttggaagctgaacactacacttttaactaagccacaggtcaaagaaaaagtcttgggggaaaacaaaaatacattgaactgaatgaaaaagaaaacacaacacatcaaattttgtaggatggaactaaagcggtgcttcgagagaagtttatagcacaaaaatgcttacagtagacaagagggaaagtatcaaattggtcatctaagctcccaactcaagatattagggaaaaaaaaaaaaaagaaacccaaatcaaacagaagaaataaaatagcaaatggcaaaaatcaataaaattgaatagagaaaaccaacaaagcaaaaagttggttctggccagtcacggtggctcacacctgtagtcccagctagtcgggaggccgaggcaggaggatcacttaagcctgggaaactgaggctgcagtgagcagtgattgcaccactgcactccagcctgggtaacagagtaagatcccctccccctaaaaaagatggttcttacaaacaatcaaaattgatgaacctctagcattattgagaaagaaaataatgaaattacttatcaccaatttatcagaaaattaatcaccagtgtcaggaaagaaacagtggatatcattacaagccttgctgacaacaaaatgataataaaggattgaaacaaaacagctctacacacataaatctgataatttacataaaaagaactaattcctcaaaaaagcaaaaactactgtgtccggacttggtgggttcttggtctcactgacttcaagaatgtagccgtggaccctcgaggtgagtgtttcggctcttaaggtggcgtgtctggagtctgtcccttctgatgttcagatgtgttcggagtttcttccttctggtgggttcctggtctcgctggctcaggagtaaagctgcagaccttcgcagtgagtgttacagctcttaaggcagcgcgtctggagttgttcgttcctctcggtgggctcgtggtctggcttggctcaggagtgaagctgcagatcttcgcagtgagtgttacagctcataaaagcagcgtagacccagagagtgagcagtagcaagatttattgcaaagagcgaaagaacaaaacttccacagcgtggaagaggacccgagcgggttgcctatgctggttcaggcagcctgcttttattctcttatctggccccacccacctcctgctgattggtagaaccgagtggcctgttttgtcagggcgctgattggtgcgtttacaatccctgagctagatacaaaggttctccacgtccccatcagattagttagatacagagtttccacacacaggttctccaaggccccaccagagcagctagatacagagtgtcaattggtgcactcacaaaccttgagctaaacacaggatgctgattggtgtatttacaatccctgagctagatataaagactctccacgtccccaccagactcaggagcccagctgtcttcacctagtggatctcgcaccggggctgcaggtggagctgcctgccagtcctgcgccgtgcgctcgcattcctcagcccttgggtggtcgatgggactgggcgccgtggagcagggggtggcgctcctcagggaggctcaggcacggcgggctgtaggtcccgagccctgccccgtgggaaggcagccaaggcccggagagaaatcgagcgcagcgccggtgggccagcactgctgggggactcagtacaccctccgcagccactggcccgggtgctaagtcccccattgcccggggccagcagggctggctggctgctccgagtgcggggcccaccaagcccacgcccatccggaactccagctggcccgcaagtgccgcacacagccccggttcccgctcgtgtctctccctccacacctccctgcaagctgagggagtgggctccggccttggccagcccagaaaggggctcccaccctgcggtgggggactgaagggctcctcaaatgccaccaaagtgggagcccaggcaggggaggtgccgagagcaagcgagggctctgaggactgccagcacgctgtcacctctcactaccaccactaacccaatatgaaatagagaatttgaataaccctacaactattaaggaaactggtttttaaattttaaaactcctgaaaaggaaatctccaggcctcaatagtttcacatgagaactaccacttgatccagcaatcccactactgggtatctaccaagaggaaaagaagtcattatacaaagaagacacttgcacacacatgtttatagcagcacaattcccaattgcaaaaatgtggaaccaacccaaatactcatcaatcaatgagtagataaggaaactgtggtatatatatatatatatatatatatgtatatatatgtatatatatatgtatatatatacgtgtatatatatatatatatatgatggaataatacagagtcataaaaaatgaattaatggcattcacagcaacctgggtgggattgaagactattattctaagtgaaataactcaggaatggaaaaccaaacatcgtatgtcctcattgatatgtgggaactaagctatgaggatgcaaaggcataagaatgatacaatggactttggggactcaggtgggggaaaggtaggaagcggatgagggataaaatactacaaagtgggttcagtatatactgctccggtaatgagtccaccaaaatctcacaaatcaccactaaagaacttatactacctattccccaaaaacctatggaaataaaaaaagataagaaaaaaaagtaaatgtgaaaatataagctacagactaggagaaaatatttgcaaatcataaatctaataaaggacacctatctagactatacaaataactctcaaaactcaacagtaaaaacaaaaccaaacaacaatctatatttttcagtgaaatctctcttcacggtaccgcacagtcatgattactgtagctatataataaatttggaaatcagggagagtgctacctcctactttattctttttttttcagaattgttttagttattcagttcttttcctttgcacacaatcttctcttcatcgaagagcgatttcactgaaaaagatacacaaatggcagataggcacaggaaaagatatttaatcaacatcattagccattagggaaaagcaaagtaagaccacgataaaacattaactacatacctattacaacgactaaacttgaaaacaatcacagcgacgatatgaaacactgccaaggatgcagggacactgcatctcccacaccttgctgatggagatgtaaaatggtgcagccacttgggaaaatagtttggcaatttctttaaaacactaaacagatacttagcatatgactcagccattgcacccctgagcattatcccaaagaaatagaaactcaagccaggcacggtggctcacgcctgaaatcccagcactttgggaggccgaggcagcagatcacctgaggtcaggagttcaagaccagcctggccaacatgacaaaaccctgtctctactaaaaatacaaaaaattagccaggcatagtcgcaggtgcctgtaatgtcagctactcaggagactgaggcaggagaatcagttgaatccgggaggcggaggttgcagtgagtagagatcgcaccactgcactccagcttgggtgactgagtgagactctgtttcaaaaaaaaaaaaaaaaaaaaaacagatccacacaaaatcctataggtgaatgtttatagtagctttatttgtaatacccaaaaaacaaaaacagccaagttgtctttcaataactgaatgattaaacaaactatagtacgtggaaaagtgttcagtaataaaaaggaacgaactattgatatataactacatttgacccttgaacaacttgggctttaactgtgcaagtccacttataagcagattttcttctgtctctaccacccctgaaacaacaaaactaacccctcctcttcctccttttcctctgcatgaaaacaacggggatgaagaccttcataatgatccacttccacctaatgaatagtaaacatatgttctctttcttatgagtttaatacatttttctagcttactttattgtaagaatacagtatataatacacagaacatgcaaaatatggctttcattcaacaataagctattagtaattaaattttgggggactcaaaaattaatttcaactgggcggagttcagcacccctaatccccgcattgtgcaagtgccaactgtatttgaatggatttcaagggcattatgcatgagtaaaatattgaagtcgctcgcaaaaggtcacatactgtacaatcccatttatataacatccttgaaatgacaaaattatagagatggaaaacaacttggtggctgacaggggttagggatgggggaaaagagggaagtgggcgtgactatgaaaaggtggcaccagggagaactttgtggcaataaaaccgttttgtaacttgattgcagtggcgtttacatgatcatgtgatcaattgaaactacacacacacacattgcaccagtatcattcctgattgtgatgttgaactatagttatataagatgtattcattgggggaaactggatgaaaggcacatgggatctctccatgatacaatttctttgcagcttcctgtgaatctataattacttcaaattttaaaaagaaaagcaaaattaaagattttacaaattaaatctgaaaggaaattaagtgttaataattgcctctttgggaggtggaagtacatgaaatttttctgttttgcatgcaagtattttctataatgaacatatatgttactttgtttttatcacagtaatttaaaaaaaaaaatcttcctcaaaccatggtcatgagaggtctactcagctgcttacatgttcccctccagtgacggcacaggggatggcctctcctaaaacaaccctaggaggatggcctcacagatgagggaagtggggagagcagagcatctcctggctagggacctctgagttatgcagcaagcatcaaccatttgcaacaaaaaaaaccatgagaaacatacacttattcacaatgctggtaggaatgcaaaattgtatcattgcaatgcagtggggatggggaatatctaacaatttatgtatggatctgcttttcaaaccagttaccctatttctagggagttcacctgaagaagcacctctggcaatatgaaaacacatgtccacgaagttattcattacaacactgtttatcactgcagaatattggaaaccacctacatgcccaagcataggagagtagctgaatgaattatggtacctctacacaatggaatgctgctgtaacaaaagaatgaggaagatctccatggcctgataagaagtgctttgcaggacattctgtcaagcgaaaaaagcaaattgcagaagagcatatagagtatgctatcggttgtgtaagaaggaatgatgaaacatacacatagctatttatctttacacacacacacgaaggataaaccaggaagaaatgaagttggttacccgtaagaggtgagaggaaaataaggtggaaggaatataggagggagtgacccttctctgaaatgtctttataacgaggtttgacttttgaaagcacgttaatattctaaatgttcaaaaaataaaattaaacaggaaaacaaactaaagcaaattaacctaattgtatttcaaatgaatattataattatactgaaggggaaggaaagaaggaaggaaggaaatgtgagagggagggaaacagggaaggagggggtaataaatgaaaggactaactctagtaatttacgtatattttactatatacccatagtctttaacagggttggaggatgggaactgcaaacaaatcctgaattcattttagtagaactgttttttgtagtggtatggctgatgcaattgtaagactatgttaaatatattatactgttataatgtatatagatatatcaaattattatattaagcaaatgagtaaatgtgttaatgttgggagccagtattctcactgtggaagaagggacatgcaaatgggaaaagcaaaaaagaacctggaattaggagtggtggtgtaaatgcatgatttctaaaatatgcataattatgtgcatatatgggcatatgtgtatgtctgtgtgtacacatgcacacatttttctagttctatccactgaaagagcctaaaagcaaagacacacaagtagcacctagctcctagatctttggtctctaataccattccatgctaaaaggaagcagtgctctccagagaaatgacttattcccggagaggagcagaatatgtacaacgtgagccctgaatatcttattatgccagacacagagtgtttttaaaaaatcagcatgtcccaagggagatgaaaagggctcccactagtcaacttcagaataatttaagcacccaaatattaagtacagtaacaagttataaaccatcagaaaatagaaattaatgagtccttactgataatagataataggtagatgatagatagataataggtagatgatgatagatagttttaatttttaaatggggaagtatattcttt[137 bp omitted]tatagcgagaccacatgtcaatgaaaaataaaattttggctgggcacggtggctcatgcctgtaatcccaacactttgggaggctgaggcaggtggatcacctgaggtcgggagttcaagaccggcctggccaatgtggcaaaaccccgtctctactaaaactacaaaaattagctggacatggtggtgggcacccgcaatcccagctactcaggaggcttaggcaggagaatctcttgaacccaggaggcagaggttgcagtgagccaagatagcaccactacactccagcctgggtgacagagcgagactccatctcaaaaaaaaaaaattatttgaaaaaagaaaacttttacaaattagatgagtgtagtggtgcatgcctgtggtcccagctactcaggaggctgaggcaggaggatctcttgagctcagaagttggaggctgcaatgtgctgtgatcgcaccactgcactccagcccagctgacagagcaagaccctatctctaaattttaaaaaaaaattaaaaagatgaattttaaacaagaaagactgtgggaaagtttcagattaaaagagagtaaagaggacacaaaatccagtatctgactagagactggatcctgtactggatgggggaataggctataaaggattttattgtgccaattgacaaagttggaatatggatgatagagcacataaaagtattttatccctggacatttatgaaggtgataactgtgggtatgtaagagaatatctctgttcttaggaaatacatactgatgtatttaggggtaaagagccatgaagtttgtaatttactatcaaatggagggaaggaaggagagagggagggggagacagaagggggagagagagcacaaatgataaagtaaatgagaacaaatattaacactaggtgaatctgaataaagggcatacgggtgttctttgtactctttatttttgcaacttttttaaatttgaaattatttccaaataaactgtttcaaaatgttattatagaaaaaacaaagtagccctcagaaaatgtttttcccctaaactcccatcaaccacttgggagtgctcacttcccacacccttggcaacattgattagaatcacacttgaaaagttttaacaggcttatgagtaagggactgcctttattactagtgagattgaacatcttttcatatcatgattgaccttttatatttcttcctctgcaaactgattatccaaatctttctcctgtttttttctattgaagtattttttcttattgatttgtagaaactctttatatattgtatatattatacaaggattttatgtgataattacttaaaaggattagcacagggaaggatacagaataattactcagaagaaggatgatttgagcattgttactttaataatgaggtgggggtggtaatatttaaatacttaaatgtaaataacactgtaacgtagtactcaagaacatgggctttagggttaagcagagactgggttcaaatcccagctccatgggtgccactggccatgttgttacgctccctgagcctcagctcccctactcataaatcttatctaaaagttgtaatgaagagcccatgacattctatctgcaaaggatatacaatacttagtacacagaaagcactttctaaatgctattattaattttgctaccagagagcctccctgctgcttcccaagggtaatccttaccagagacaagtagcatagcatgatggcaactgttttcaccagaagagatgagatgcagggtgtagatgccattgtcagatgcacgcacatcaataatgatcagggagccatcagctctgcctgtttccctgccagtgtgggctggtcctagggtgtagccatggctgaagaagttaaaattgaggatccgggtaacctgattggtggttgctcctcggagccaattgtaggagatgagattctgagggatcccctggacagacagggtgacgttgccccctcgacggcccagggagggatggatgtgatcgtcagctgagcagacacctgcttcttgcagaggctcaggaagaaggcaaagggaggaagcaaagagcactatcacagaggccacttagcagcattcgacagtagactcagccactgctagagtctcactcatcggagttaaactgtgggagtgggaagagcatgtgcaaaggccctgaggcaggaggaagatcattgtttttgagggaaaagcagggaagccagtgtggttggagttgagtaagtgaaaatgaaagaggtaagagataaagtcagagaggtaagagagacagatcacacttacaactggcattgacatttttggcaagacaattattcatcttgtggatccgtcctgtgcattgcaaggagtttttaacaccacttgctctccctactacaacagcagcagctccttccaggcattgagacaaccagagaacattcccacacattgtcaaatacccgctagggggcagtattagctctggtttggaacatcatgcaggctcttgcagataattatacgagtttttttgtttttgttttagtttttgtttttgtttttttgccacagagtctcgctctgtcactcaggctggagtgtgccagcttgatcatggtttactgcaacctccgcctcccgggttcaagtgattgtcgtgcctcagcctcccgagtagctgggaccacaggcatgcgccaccatgcccagctaatgtttatattttttttgtagagtcagggttttgccacgttgaccagactggtcttgaactcctgggctcaagtgatccttgtgccttggcttcccaaagtgctgggattataggcatgagccaccgcaccagcctgtaaggacttttcgttgtattctgagggagtcagagaaccactggagagttttgagttaaagattaacacgatgtaccttatattctgatcattctggctgcagattgcattgattttggagctcaagggtagagttgcaacattgctcagctccacgaagtgagctgccattcacattgtagttaatgcaaatgctacttccagcaactgtgcagtgcacaacccatacagctatatgtggtgaccccaggcaaggcagaagcaggagacaccatttaggaggtgactgcaacaatccaggtgagagatatcagtggggaagaaaatcagaaattatgatccgtaactgttacctgcaagacagagccatgtccaaagcccaccacctctgcagggaccttccaaggggccagccctgtttctttgatgcctcaccagtctagctgtccttctgcctcctcccagctggaggccaggcctaggggaagttcaatagtgtctgaaaagccccgccctctatagggtctttggttttacctcctctcagaagacagcccatcagtactgctccctggatcccactcccattcaccccagattccacactgagagtttggggcagggtccactggcaccagtttgggtcttaccaattctacagattcctccaggctctgccatcacagaaggtccagccccagtgctgctttggccagaaagaatgcttggcactgcatttgctgacaaggagtgtggcctgtgtttatcccagaggtgggtgaggcagcctctgctggttccagaggtcccctctgccacctgaggcgccagccatgcagtgctggtcctaggtggggttacagaggtattgacaccagcctggtctctgggttaatttttgttaagggcctgcgacccagtgtggaggggttgatattgcgcagccttgaaggacgtggacatgagcttatcagaacaagtgatagcaagataaaagatcaaagtaggctctttgcctcagattctgcatggcagcaatttccaccagcagggtccaaagacccaaaatgaacaaggaaagcaacctcctgaagggacacttggtaatcaccttgatctttggttttcaaagtctgcagtccacttggaaagcaaggtacaggggcagagagagttgacaaatatgtactgcttgatgaatatggaagaaacaaagaaaacagaagtttgaaaaccaccgacctagaatttttaaatgacgacacccagtgctagcgatctctggagaacagttttgcaagatgcatccaaaaacatacacatgtacactctctttgaccccaccgttcctcttacatttatcttaagataatcattatagatatgtgaacatatttacttctgggataatcatgacagcattgtttatagcaggaaataaagtggaaacaacatatattctgtctgcagagaaacagaagcaatctattctctctctctgtgtgtatatatacgtgtgtgtgtgtgtgtgtgtgtgtgtgtaaaatacaacaacaaaactgttcaccaatgatcaggtgctgtcctgttacatggtgaacgcattttatctttcccacagtcctagaagttagatacaactatcatcatctccatttatcatatggagaagttgagacacagaatcactggcccaaagtcacatggatgataagaggcagaaccaggatttgaacctttgcaggctggatccactgttcatggtccttcccattccactgttttacctctcaaatttggaaacattattctacctgccagttgttcagcagttactatcgccaggcatacactgaattatctcagttaattctcactccatgaagcaggatctcttgctgtccccattttatagatagaaaaactgacgctcagagaagaagagtcatttgttcaagtcatacagttagtaaatgacagagccagttacgctgcaagttacccagatttcaaggataagcggtatgtagtaaaaatacatcatgctatgagaattagagatgttcttctgaagatctgatgtttcatctgtgatctaaaggatgggtcagaattaagtagacaaagacagtgaggaagagtgtaatgactggagctccagcagccattctgaatgacgaactgacttaaggaaggaagctatgtctgatataatggaacagaaacatagaaggagcttgcgtggaacaggaatcaaaagaaattaaagactgtctaagcaaaaactcagttgtatgtaagaaaacccaattccccttgaggaagagaaacagctggagtcctttaaaattaactgcctgtttttctgtctgtggctagtgagccttatcgctccctttcccaggcattgtgaagactctttctctagctgtgcagctgcaaggtcattagacagataatctcaagtcgtaaaacatattattccttgaaaagtaagaaataatgtaatgcatgtcttaactgaataactgtttttaattcttgcttctgtaatacgcttccccctgcacagaactccccccaccccacgaaatgcttaaaaggtagcttgactctttgttcggggctcagtcctttggatgttaatctgactgggtcggtgcacctaaataattaaataattcctcctcaaccccttggtccctctgattccttaattatcccacagcatgggtacctggtgaccatgaagtcaccagaccacactgagatgtctgtatcagttacttatcaccatgtaacaaacctctctaaaacctaggaacttcgagagacagacaaaaatgcacaagacttgttgtggcctgggctcaggactgccactttattatttctacctcattgttttggtcaaagcaagtcatgaggtcaaccaagattcaagggtacaggaaaacaggctccacctgtttgtgggagaagctgtaaagtcacattacaaggtgcttcgatacagagagtagagaatcggagccgtgtctgtgatcaaccaaccacaacttattttacatgagagagaactacactcctttattaactaaaccactgttatttgagtttctattttatgcagctgaaccaaatccccacctgacataaagagtgttgcaaatggagagaagagtgtaagcaaaggcccggtggtgggaggctcatgacacttcaaatcactgaaataagtgagggggtggatttcggggtgagaagataaagtcaggcaactgctgcccaccagcacggtgtttcctgctcttcccaagagagactcacacatttgacaacagttgttacccacgcatcaggtgggttcagacacttggcaggtatcaacccaatgactgcaaccaaagaggatttagcatggggattttattacttgcaacaagtaaagagcacactagggatagttcccaaagcagtaacctctctgagctggggtgccgcggacctattggactgaacaaagtggggcaaacatgggaataaaagacaagagacaaagaagtatatttggaagaaagggtcagggggcaccttgcctctagtggacaagcgccctgagctttacacggccctccatatttattaggcaaaagagatagtgagaaagtggggagtgattgtcgagtaattgtcagtcgggcgtttggttcacagcaggctttcgagattgcatcctttgagcaataggcgctaatattctcagtagataacttcaaggagcccggagcccgggaatgatgtccctcagcaaaccttttggtggcagggcagtgtgagtttgcccacatcctgcattcatgataaacagtttgttatttgatcatatagcctccagcggaatgctgagttggtcacgatccctttggccttttcggctcccaacactgggggcagggtcaggatttttataagcatagggtaaggaggcatgatgtgattggatcttgcaatgaggtgatgccaggaggcatgatctgactggatcctgccatgatggggtgatgccagggcttgatctgattggctcctggatcctgccatgttatgtctgcttcttaattctgtccctgctccttggtccaaatgcttaggttcccctgtggttgcgtacttggttcacctgggcatgctcagtttatgtgacctgagggtccatggcaacctaaaaacaacttacaactttgttacataaaagttgaaccagattgtactgctacataatcacactgtaactcctggagcaggatctggttcaacctgcatttattaaacacatgatgggtggtggatctaatgctgcaggagttagggatgaaggcggggttccaagtgttaagaatttcctggccgggcgcagtggctcacgcctgtaattccagcactttgggaggtggaggcaggcagatcatgaggtcaggagatcaagaccatcctggctaacacggtgaaaccctgtctctactaaaaatacaaaaaattcgccgggtgtggtggcacggcacgcgcctgtagtcccagctactcaggaggctgaggcaggagagttacttgaacccaggaggtggaggttgcagtgagctgagattgtgccactgcactccagcctgggcaacagagcaag[211 bp omitted]gaggcagcagaatcgcttgaatccaggaggcgtaggttgcggtaagccgagatcgcgccactgcactccagcctgggtgacagagcgagactccgtctcaaaagaaaaaaaaaaaaaaagatgatcatgatggtttagggggttgaatggtggccccctaaaaaaaatatgtccacccaggacctgagaatatggccttatttggaaagggatcctcgtgatgtaattaagttaaagatcttgagatgaagtcatgctggattgtccagctatgccctaaatccaatgacaaagtgttgttataagagagagaagaggaaggccgggcaaggtggctcatgcctgtaatcccagcactttggaaggcagagatgggcagatcacctgaggtcaggagtttgagatcagcctggccaacatggcaaaaccctgtctctactaaaaatacaaaaattagccaggcatggtggcaggtgcctgtaatcccagctactcgggaggctgaggcaggagaatcgcttgaacccaggagatggaggttgcagtgaaccgagattgcgccactgcactccagccttgcaacagagtgagactccatctcaaaaaaaaaaaaaaaaaagacagagagagagagaagtggagaagacacggatacacagatacacagaggataaggccatgtgaacactggggcagggactggactgatgcagccatcagctgaataacacctggggccaccagaagctggaagtgtcaagggaggttcctcctagaacctgcagagggagctcggcctatgcacaccttgatttcaacttctgccctctggagcagtgagagaataaaatgctgttgttttaggttaacaagtttgtagtatgaggttggtacaaaagtaattgcagattttgccattacttttgcaccaacctaaataatttgccaaaaccaccgctggaaactagtatggatggtaacagaaacgtgtctgtgggaccagatagtgtaataggctgttcaggaggggaggtgatgagcttcctgtcacttcagggttaaggatggggaccttctcaggaagtcttgttttctaattgagatttcttccccatcagaagcatctcaaacctaaaagacattaggagttgcctctgttacatgtcgaatccacaaaccagtctcttcccttcttacctcccctccttcccaactggtatcttccctgcacacccctccaggcccctcttcctcaaacaccattgtccccaggacttcaatgtctaccctccccttggaaacctttagtaatataaaatcaccaaagcatcttaaaacaataatgcccagtgtgggcaaggatgttcagaaatgggcactctcatgtacatttcatggcaggctacattgccacaataatttcgaagggcaattttatgccatgtatcaagaattaaaatctgacttagctattttattttcaggaattcagcctgagaaaataacctgtgatgtgcaaaataaatttatacacatgacccttcctgatctatccattggccctgtccccagtcctgtcttttgctgatcacttgcttgaacagcacatgccattcagattaaatccacatcatggagaatgtgcactgtttttctttcctctgggctttttacatttgtaaattcctgccctccccttgccaattaactcctgctcttccttccaggataaattcagatgtcacctcctccaagaagcttcttggcctcctgggagcagattgggtacctcctcagggtccctaagtgccctcccttattgctcaaaaggcaatgctatggggtgattaacagggaagattccagagccagtctctgattctaacacctgctttacatggctatgtgactctgtgactctgggcaatttacccacatctctggctattctctctctctctctctctctctctctctctctctctctctctccttctctctctctctctctctgtcttttgagacagagtctcactctgttgcccaggctggagtgcagtggtgtgatctcggctcactgcagcctccgccccccaggttcaagtgattctcgtgcctcagcctaccaagtagctggaactatgggtgcacaccaccacactcggctaattttttgtattcttagtagagacaaggttcaccatgttggccagactagtctcgaactcctgacctgaggtgatctgcccacctcagcctcccaaagtgctgggattacaggctcgagccaccatacctggcctgttttctcttaaacacttattaatcgtttgctgtgtgccgggaactgttctgtgtgctttacaaatggcaattcattgaacctcccaacaaccctgtgaggcaggggttagagctacccattttgcagatgaggagactgaggccttgagagtttaaatggcttgttgaagttcacacagtgcaaattgcagagccaaatctgaatccatggcatcggcgactatacggtgctgcctctgggcctccatcctcatctggaaaatggggcccatagtaacagtgtcatatcgtttggatgtttgtcccctccaaatctcatgttgaaatgtgatccccaatgatggatgtgggcctagtgggaggtttttgggtcatggggcaatccctcatgaggctttggcgccatctttgcggtaatgaaggcattcacgctctgttcattcatgcaaaagctggttgtttaaaagaacctggcaggccgggtgcagtgacttatgcctgtaatcccagcactttgggaggctggagcaggagaatcacttgagcccaggagttcgagaccagcctgagcaacatggtgaaaccctgtctctacaaaaattaggcaggcatggtggcatacacatgtagtcccagctacttgggaggctgaggcaggaggatcacctgagcctgggaggcagaggttgcagtgagccaagcctgcaccactgcactccagcctgggtgacagagtgagaccctatctcaaaaaaataataataaataataaaaaaataaaggctgggcacagtggctcatgcctataatcccagcactttgggaggccaaggtgggcagatcacctgaggtgatcaagaccagcctagccaacatggtgaaaccccatctctactaaaaatacaaaaaagtagtttggcctggtggtgggcacctgtaatcctggctacttgggcggctaaggcagaagaatcactcgaaccggggaggcagaggttgcagcgagccgagattgtgccatcacactccaccctaggcaacaagagtgaaattccatctcaaaaaaaaaagagcctggtatctctcttgcctctctttcactaggtgatactcagcttccccttcaccttctgccatgatgataggcttcctgaagcctcattatgagctgagcagatgctgccatgcttgtacagtctgcagaaccatgagcctaataaacctcttttctttgtaaattacccagccttaggttttcctttatagcaatgcaaagcagattaattcacagtgcccccttgtagaggagctgagaggactagactgtttatgtcaagctcctggagcagggcctggcccatcctcagtgctcggtaagtatcagagagtatcatcagttacgggactatcctattttcctaccttctttatcgtttcatcatttctgttcatcatcgcctaaagcctcctgcctactattttccaggctctcaaaatggggtttctttgattttcatagcagcccgaaggggaagtacaatcattgccccattttgcaaataaggaaattaatcagagaggtcaagtgacttacctcagatcacacagatgacagaggtggagcaagaaattaatttggcttgtcctactcaaagattccctgccctgcaacttcccctttaagacatgattgtttaatagagtgagtctgggacaatgcacatttgtcaggtacgcaggctctgggaagctggaaatgggaccagccaagactagagctctgatataacctctgagaaatgccctccccaacctcagttctcagccacaccctcacctacgagcaacgctcccatccagggctcaccccagccatggggagcaaccaggaaccgggccatgggtcctttaggagtgcttcctcctagaaggacattggtttgcggagaacagactgcaagaaccccagagtgagccgatttgtgtgtcctgcccggagccctagcccagagaggagatggcccagccttctgtccccatgatgagggccgtgcccatggggcattggtggccagccagggagggactggcacagccctcttcggtttacaactgttcaatgtctcattaacttctcctctttggtcatgtctctggcccagcattcgtgccctttgctcttcccaatcatcctcatggtaggcaaacgtgggagggcaggggactgcatgctcccctcctggcttcctgctgtataaatggggaaacagaggccccaggagagcaagtgatccccccaggaccatacaaggagtctgaaatctggccctgactggattccagtctttggctcaagcctcagccagaagtctcatcctgcatatctggcccagtctgaagactcaggtgggagacaggaaatgaaaatcttcaggagcttcagggaggctcattggaaagaaaaggaaacttgtatttactgagaaaccagctttgccgatgcaacagcaaatcctgagctcagcgttcaaatttctccagaatccaaccacttctcaccagctccacccacaccagcaccatctcccacatggaccattgcagtagcctcctcactgggctccctgctcctgccctcctgctaacacctaagttgtctcatgtcccttgcctgctcagaggcttcctgtggcttctgtctcactcaggaaaatgcctaagtcccaacactggcctgcaaggtccatggtctggccccatccctgccccacccttatctcccgcttcctcccttactccccgctctccagccacactggcctctccactgttcatcaacactcagggcacagtcctgccccagggcctttgcatttgctttactttctgccccaaacactcttcccaagatagccacatggctttttccttcaccacagtcaggaccctgttcagatgtcacctcttcagagaggccttccctggctgtcctgtgtacagcctagcacttcctgtcccacctgtctggtttatttctttccaacacactcatcgccgtgtgacactctccactgatttgtgtttgttgattgctctccctaatatcagtcccttaaaggcagggatttctacctggtttttttaattctattttatttttttagagatgaggtcttgctatattgcccaagctggtcctaaactcctgggctcaagcgatcctcccacgttagcctcccaagtaggtgattctacaggtgcaagtgactgtacctggcccctctgcctgttttgttcactcttgtaaatgcccaaagcctagcgcagtgcctggcacatggtaggtgttcaataaatattttgtgaatgaatgtgtgagaccctgcactgagcagttgaatccaaattaagtgcaagtttccatccccatggccatcaggctagaacagagaggctcaaaaagccccccagccacacaccctataaggggaggagttggtatttggacccacatctaatgccaaagcctgcattcttaaccactgcattacactgctcctggatttagggattttactgatgagacccacagaaagtgtaatagccatccccactgatgcccctcccttagttaacgaagaaatctcaaagataagaatcaaagggccaggcggggtggctcatgtctgtaatcccagcactatgggaggctgaggtgggtggatcacctgaggtcaggagtttgagacccagcctggccaatatggtgaaatcctgtctctactaaaaatacaaaaattagtattggcatgcctgtaatcccagctacttgggaggctgaggcaggagaattgcttgaagtggaggttgcaatgagccaagattgcaccactgcactccagcctgagtgacaagagcaaagctccatctcaaaaagaagaaggagaaggaggagaaggagaaggaggagaaggagaaggaggagaaggagaaggagaaggaggagaaggagaaggagaaggggaaagggaaggggaagaggaggaggaggaagaaggagaaggaggggaaggggaagaggaggacgaggaagaaggagaaggaggggaaggggaagaagaagagtaaggggaaggggaggaggaggaggaagaaggagaaggagcggaaggggaaggggaagaagaagaggaagaggaagaagaagacgaggaagaggaggaggaggacggaaaagaagaagaaaaaagaagaagaaggaggaggaggaggaggaagaaagaagaaagaagaaaagaagatgatataggaaggatataaggacccagagcaagcccaggcacaagcagatgccttgaatattcttcccaactctgagctgagacgtcgtccccgcttggccgagggcagctctgccccctgttggtcactcatggcaacggccccattggtgtcccaggacaacagcgttgacaaggataacccaactggcaagtgctcaaaatccctaatatacacagagttcctgaaaagcaacaggaaaaaaagagacaatgcattttttcttttagatatagggtcttgctttgtcacccaggctggagtgcaatggcatgatcatgtctcaccacagcctagatctcctgggctcaagtgatcctccagctacagcctcccaggtagctgggactacaggcctgtgccaccatgctgggctaatttttaaaactttttgtagaaatgaggtctcactatgttgtccaggttggtctcaaactcctaggctcaagcaattctcctgccttagcatcccaaagtgctgggattcaacacaattttttaattggcaaagtacatgaataggcaactcacagaggacatcatcttcaaatgactatcaaacttaagaagagataggcagcttcactagcgatggaaatgtattttaaaaccaccttgggatacgaatgtttatatgtacatggagcaaaaaaaaagtgaaatattaattatatccagcaacaggaaagagaactgttataaacactgttcaagtatttggtggccattcactggcactggcttgtacccctgctgagcttgggggacaaggagccacagtgcggagctttgggcgtcccagtccacacttctgcctctgcactctcttattcccgtgtgtgtgtatccctctgttgtaacaccctagctctcagcaagtgacaggaaagagtctaaaaggcaaagttagggacaggacaggaccctgcacctgtgttaatcacaccccttcaccctccaacagggcagaagcaactctcaatgctatactgcctgtcctagctttggctgccgttttttttgttttgtttttgtttttgtttttgtttttgttttttgaggcggagtcttgctctgttgcccaggctggagtgcaatggctcgatcttggctcactgcaacctctgcctcctggggtcaagcagttctcctacctcagcctcccgagtagctgggactacaggcgcctgccaccatacccagctaatttttgtatttttagtagagatggggtttcaccatgctggccaggctgatcccaaactcctgacctcatgatctgcccaccttggcctcccaaagtgctgggattacaggcatgagccacagcgcccaggctgactgctgttttttaggctccctgtggtggtggggagtgtaggggttggtcaggtaatgctaatggaaaagaagggcagaccccaaatctctccccacccgtggcaccagtctttctacaatgggaatgctcccacccacgacttcaccctcatccagaacccaaccaccttctgttgcctcattagtcctgcttccagcttctgaggcatctccagggctagtgcaggggaaagagccagcagaaaggcctggactgccgtgatgcattttaccttgtttgtagacatggactgaaaagctgcaagaccagcaattataaatgagaataccagctaacctgtgagtggttactctgtaccaggcactttgctaggcatgccacatacatgatctcctttaataacataacccatgataacccatgataggccaggtgcggtggctcatggctgtaatcctagcactttgggaggctgaggtgggtggatcacctgaggtcgggagttcaagaccagcctggccaacatggcaaaaccccatctctactaaaaatacaaaaaattagccaggtgtggtggcaggcacctgtaatcccagctactctggaggctgaggcaggagaatcgcttgaacccaggaggcggaggttgcagtgagccaagatcacaccagtgcactccagcctgggtgacagagcaagactctgtctcaaaaaaaataaaataaagtgaagtaacataacccatgaaaaacctatatcgtaatctctgttttacaaaagaagaaacagatgctcagcgaggtatagtaatttgccaaatgtcactctgctagaaaatagctgagccagaattcaaacccagagcttgtactttgaagcatttccaatttgctctttgaaccaatttggaggctttcatttctggaagccaggctgttgacagctttcacttcttatactttttcccacctagaaaggtctggctgggtgcagaccaaatatgattctggtgtcaatttgaacagactgaactcaagtccacatggacccttcaggatggtccaactgggagaagccctgagggtcacacagaagggcctctccaccttcaacaagtctcctgaggatgagggcagtgcacttaccactcagcaaagccacacatgcatcctcattagaggggcaccctctctgctggagaaccggcaagtctcaaaattggggcttagtccaggagggttcttgcctttgcccaggaaagaattcaagggtgagctggtggcgttagacagcaatcttttattgcacagtactgctccttgcagagcagggctatctcataggtaatgtgctcagagcaggcaaggtagggactgttgccaactgtatttatacccacttataccaactttcacttacatgcaaattaaggggtaggtcaatgcaaatcgagaggtgggtcatttagaattttctaggaaaatggtggtaaattccgggtgatttccacacatttgtaaactgtcatggctctggtgagaatgtcttgtgctaatgcacaatgagggcagctaaggattgcttttgttgccatctgctggttcctgccagttttttcattctgtcccttcaggactgagaaataagtcctgccaacctatctcctacctcatcttttcctcagcccagtcggggatggtgggtgactaagaaccagactggttggaaaaacatgctgtgatttaaacctgtaatctcattctggatttttatagcagacaagccagttggacatgcccagtctttttgccataaaaccccaatgtgcaagggagaccagaccaactccattctagctgaggagcccctggctgggctgcctctggtccatattttgcatctccttatatcaagtctgagcattgtcttccaacccacggagttcttgaatgatggagcccagcctcttgatgggtattggcactcaagctgggctcctgggaaccccacatggccgcacccctctcccatgatgggggagaatctcctccctggaccctccctgtgggggcatcagaatctctggggcagcaacagggctggaagagaagcctggacttctccagaaactgtgtctgtatggccagcacatgttttcacttcccatgggtatttatatgagtgaagggcagatatagagtattaagagaataaggatcctaaaagcctccttggagtcaccaaggtcctccacagtccctacaacctttaactcctcagctcccctcacccagggaaattccagtcaaatagactgaaccacacaagtggccaaataatttcagggaagtttaaacccctttcagatgcgctagttgatcatatcttgccagttatcctcaagctccccaagccttccagccacctccaataacttcatagaaaccactggttgctaatgatcacggagtcctggactcctttgaaaatgcattgaaagttgtgtgatcctggactgaagcttcaggcccttcctcagaatatgcagatgtatgcacaatgcttcacacaatgtcagggatcctttccaaggaaatttacacccagacatatcatcatccaactgtggaaaatcaaacacaaagaaaaatctcgaaagcatccagagaaaactaaacacatcacttataccaaaacaacaattcagatgatggcagatttctcatcaggaaccatagtggccagaagaaagtggcactttttttttaagtgaaagcaaatttattaagaaagaaaaggaataggccaggtgcagtggctcatgcctgtaatcccagcactttgggaggccaaggcagtggctcacgcttgtaatcccagcactttgggaggccaaggcttgaggccaggagtttgagagcagcctgggtaacatggggaaaccttgtctctacaaaaaatacaaaaattagctgagcatggtggtgcatgcctgtaatcccagacacttgggaggctaaggcatgagaatcaggaggcagaggttgcagcgagtcaagatttgccactgtactccagcctgggccacagagcaagactgtctcaaaaaagaaagaagaaagaaagagaggaagaaaggaaaaaagaaaagaaagaaagaaagagagaaacgaagaaagagagagaaagagaaagaaagaaagaaagaaagaaagaaagaaagaaagaaagaaagaaagaaaggaaggaaggaaggaaggaaggaaggagggaaggaaggagagagagagaaagaaagaaaagaaagagaaagaagaaagaggaagagagagagagagaaagaaagaaaggaaggaaggaaggagggaaggaaggagagagagaaagaaagaaagaaaagaaagaaagagaaagaagaaagagaaagaaagagagaaaaggaataaaagaatggctactctataggcagagcaatggcatgggctgctcaactgagtacacttacagttacttcttgattatatgccaaacaaagggtggattattcatgaattttcctggaaaggggtgggcaattcctggaactgagggttcctcccctttttagaccatataaggtaagtgctagatgttgccatggcatttctaaactgtcatggtgcttgtgggcatatcttttagcatgctaatgtattataattagcacataaggagcaatgagcatgaccagaggtcacttttgtcgccatcttggttttggtgggtttggctggcttctttaccacatcctgtttcatcagcaaagtctttatgacctgtatcttggtggcacattttttaagtgctgaaaggaaaacaactgtcaacccagaattctgaatcaagtgaaagcattctttaggtttaggagtgaaggtgaacattgaggttagctcggtttcaccttgaatatgtcttaaatcccctatgcatgcagtgaatgtggttttatacataaaatgttgtacagcagtagctgtatgcatacttacagtgtgtacagagatgctcagtacccaacaggacaaatctgcaaaatacagcttcaccattgagccatagatggagctgctgcctcaaattagagctgtatttccacctgtttctatagttaaaatttcataaattaaatgtgtgtatgatgcaagtctactgcaattcctttactagagagaagttgcaagaaccaatgatccctgtttctttatattcatgccctcatctaattccttccccctgagtgtgggctgtacctagtgactcatttctaatgaatgaagtacagcagaaagtgatggctgtcacttctcagattgggttacaaaatggctgttgcttctattttcaacttctctctcactctgtcttgaatcactttctgaggggaaagctacctgccagtagcaaacaccatctgagtgagcttgggagcagaacaatcaccccataccctcatcccaagttgagcttttgaatgacactgcagcccccgtccagtagcttgatcgcatcagagggaaaagacctggctaagctgagcccagattcttgactcaaagagactatgagataacaaatgttttattgtcttaagccactacattttggagtaattagtcatacatcaataaataactaatgcaggtggccttctgggacacagaggaggatggagaaggttgaatatcagagagcagatcttggggacaaaaacacagagtcctcatcacaggttatcatgcgagcccagaaaacaagcatctaacatctcatcaataatatgttcccacacaccaccaatacttttaccaaaaaaagtactaatagctaatatttcagtttgtattttctaaaattgactccatatggctttcctttggtggaaaaggaaaaagaaaatttgtctctgtcattaacttaatgtgatgtgtcaaattttattttattttattttatttattttttggagcagggtctcactctgtcacccaggctggagtgcagtggtgcaatctcagctcactgcaacttctgcctcctgggttcaagcaattctcatgcctcaccctcctgagtagctgagattacaggcacacaccaccatgcccaggtcattttttttgtattttcagtagagacagggttttaccatgttggccaggctcgtctcaaactcctgacctcaaatgatccacccacctcagcctcccaaagtgctgggattacaggcatgagccaccacgcctggccaatgtgtcaaattttagatgaggacacagagaacaggacagaggacctgaactttaataatcattctcatatcaaatatggaaaccacgttgttacggtttaaatgcttgtctccttcaaaattcatgttgaaacttaataggcaatgtggcagtatagaaaggtgggacctttagggggcgattgggtcatgcaggttctgctctgatgaatggattaatccattcatgggttaatgggttaatgaattaataggttattatgagagtggcattagtagcctataagaagaggaagagagacctgagctagcatggccccttgtcatgtgatgccctgcactctatagactgcagagagtccacaccagcaagaaggctctcacgagatgtggccccttaaccttggacttctcagcttccatgactgtaagaaataagttccttttctttataaattacacagtttcagatattatgttataagcaacaattagaaaatctttaaatccacctgggacctggaagccccctctgcggcttcaagatgtcctgcctttctgagctaaaccaatgtataccttacatgtatcaatttatgtctttgcctataatttctgtctccctaaaatgtataaaactaagctataacccaaccacctgggcacgtgttctcaagacttcctgaggctgtgtcatggatcatgatccttaaccatggcaaaataaaattctaaattgattgagacctgtcttagatactttttggtttgcagctgcaaccaaatgtcagccagagttgctgtctcatctgaggctcaactcgggaaggatctgcttggaaaccagggcgttggtaagggagtagaccacccttcatattgtcttatgtccaatttctccctccaaagaaagaagaagtaaaaactaaaaggcagaaatgaaatccacaggcagacagcccggcaccacaccctgggcctggtagttaaagatcgacccctgacctaaccagttatgttatctacagattccagacattgtatggaaaagcattgtgaaaatccctgtcctgttctgttctgttctgattaccggtacatgcagcccccagtcacataccccctgcttactcaatcgatcacaactctctcacacggacctccttggagttgtaagcccttaaaagggacaggaattgctcattaggggagctcagtttttggagacgtgagtcttgccaaagctactggctgaataaagcccttccttctttaagtcagtgtctgaggggttttgtctgtagcttgttctgctacattggcagcattcaattgctaactggttgtaggactgaggatctccatttcttgctggattttgcccacatgggcctcccaacatgaccacttgtttcctcaaagccagcaagggagagagtctcctggaaagatgactctatgttacagaattgccagaggtgttcagaccagagcaactaacacaggagacagaaattatttaggcagatagtgagggcaaaagagctctcagcagaacttcccttctaacaaaaagtagcccaagaaatcatttttcctaacaaagagcagcctgaaaaatcgggctgcaaacataaataaggaagctagaagcttgcatgggggagagccagcagctgcaccaatagaaaagggctacctgggaggggaacatcacatactcggacctgtcaggaggtggggggatggcggggagagcattaggacaaatacctaatgtatgcggggcttaaaacctagatgacgggttgataggtacagcaaatcaccatggcacatgtatacctatgtaacaaacctgcatgttctgcactgtcatgcacgtccatgtgaagtgaccaccaaacaggctttgtgtgagcaataaagctttttaatcagctgggtgcaggcagactgaatccaaaaaaggagtcagtaaagggagataggggtggggcatgtttataggatttgggtacatagtggaaaattatagttaaaggggattgttctcttgcgggcaggggtgggggtcacaaggtgctcggtggggagctccagagactaattgtccaggagaaggaatatcacaaggtaatgtcatcagttaaggcaggaaccggccattttcacttattttgtggttcttcagttgccttaggccatctggatgtatacatgcaggcttgggctcagaggcctgatgtgcacatgtatcccagaacttaaagtaaaataaaaataaaaatagattctaaaaaagaaagaaaagggctacctgcggggcaggcatgtccaccatgaaagctcaatcttcccttttttgttagcaagtatacagtaagaaagaaatggataacattgtgcagctcaggctgaaaacccacctgcataataagactggggtgggggctgccagaaattcatgccctgtgcaaatggaacacctggtcctaaccagtttcttacaccctatgtagagcaggtactgcctccccaccagctcatctataaaaacccctgcatttcaccatggaccagcaacctatttttctgggaccccctctctgtaacagacagctattctctctcttttgcctattaaacttctgctgtcaacctcactcttttctttccccccaggggaaagtgtaaacgcagtcacccactaccacaaattatgcagtaacctcactctttgtgtgtccgtgtcccagttctccatggccgtgagacaacaaacctcaggtgtcacctcagaaatgaggccatttcacaacttcatcttgtacaggagctgggtaaaatagggctgacacttcctgggctgcattcccaagaggttaggcattcatagtcacaggatgagataggaggccagcacgagataggaggccagcacaagataggaggcaagcacaggtcacaaacaccttgctgataaaatgaaatgtggtaaagaagccagccaaaaccgagatggtgacaggactgacctctggtagtcctcactactctaattataacacattattagcatgctaaaagacactcccaccagcatcattacagtttacaaatgccatgacaatgtccacaagttatcctatgtggtctaaaaaggggaagaaccctcagttccaggaaatccctgcccctttcctgaaatactcatgaatgacccacaccttgcttagcatataatcaaagagtaactgtaaatgtactcagccgagtagcccatgccactgctgtgcctatggagtagctactctttattcctttacgttcttaaaaaacttgctttcactttattctatgaaaaaaataggctgggtgcagtggctcatgcctgtaatcccaggactttgggaggctgaagcaggcgaatcacttgaggtcagaagtttgagaccagactggccaacatagtgaaaccccatctccactaaaaatacaataaattagccaggcgtggttgtgcgcgcctgttgtcccagctacttgggaggctgaggcaggagaattgcttgaacccgggaggcggaggatgcaatgagctgagatcgtgccactgcactccagcctgggcgatagagtgagacactgtcacacacaaaaaaataaaaataaaaataaaaataaatgtatggactgctttgacgagtggaagaagttgggagtaatgccctcaactactctagtgaggtcataagacaaaaataaaataaataaaaatataaaataataaaatagaaataaatgtaaaataaaataaatacaaatataaaataaatgtataataaaataaatacaaatataaaataaatgtaaaataaaataaatacaaatataaaataaatgtaaaataaaataaaaatgaataaagtaaattaaaataaaaataaattattttattttatatgttgaaataaaaaggttttatatgttgaaatcctaatgcccaaggtgatggtattaggagatgaggcttgggtcagtgatgagatcatgagggaggagctctcataatgggattggtgccctcttataaaagagaccccagggagaccctcatcccttctgccatgtaagatccatccagtgcaccgagaactggggtgcttcaaaatgagcaaggatcgtgttggttctcagagccagatttggctccagcccctttagcattggtcctttgcctgctgagttccctcaaccaggcttgcctttccttctgttctgcactccccacccactcctgctggctggaactcagctgagccttcatagctgaacaacgagtgaatgaatgaatgaacaattgaagacccagcttcctgcttcaagcaggaagtcacccccagaacactgggctttcccatcttctggcccagatagcatcagtcttatctcctttactgaccataaatttctgtggggaaaagcaagagagatcagattgttactgtgtctgtgtagaaagaagtagacataggagactccattttgttatgtactaagaaaaattcttctgccttgagattctgttaatctataactttacccccaaccctgtgctctctgaaacatgtgctctgtcaactcagagttaaatggattaagggcggtgcaagatgtgctttgttaaacagatgcttgaaggcagcatgctccttaagagtcatcaccactccctaatctcaagtacccagggacacaaaaactgcggaaggccgcagggacctctgcctaggaaagccaggtattgtccaaggtttctccccatgtgatagtctgaaatatggcctcgtgggaagggaaagacctgaccgtcccccagcccgacacccgtaaagggtctgtgctgaggagaattagtaaaagaggaaggaatgcctcttgcagttgagacaagaggaaggcatctgtctcctgcctgtccctgggcaatggaatgtctcggtataaaacccgattgtatgctccatctactgagatagggaaaaaccgccttagggctggaggtgggacctgcgggcagcaatactgctttgtaaagcattgagatgtttatgtgtatgcatatctaaaagcacagcacttaatcctttacattgtctatgatgcaaagacctttgttcacgtgtttgtctgctgaccctctccccacaattgtcttgtgaccctgacacatccccctcttcgagaaacacccacagatgatcaataaatactaagggaactcagaggctggcgggatcctccatatgctgaacgctggttccccgggtccccttatttctttctctatactttgtctctgtgtctttttctttcctaagtctctcgttccaccttacgagaaacacccacaggtgtggaggggcaacccacccctacaatttcccaagcacaaacacgaggcctgacacatgtggacgtccccctctgcgtccccctcttattgaatttattttctgtgccagggactttacacgccatgtgtcactgagtgctcacaatgacacagtgaggtagaagttatcgtcatccttccacagaggaagaaagaggatcgtgtgcacaaagtcacctgcccaagacagttggaaggacaatgcaggtgtaagcctaggacattgatgtggagccccagaagaacatgtattctggccgggcacggtggctcatgcctctaatcccagcgctttgggaggctgaggagggtggatcacctgaggtcaggagttcgagaccagcctggccaacatgatgaaaccccgtctctactgaaaatacaaaaaaattagctgggcatggtggtgggcacctataatcctagctaatcaggaggctgaggcaggagaattgcttgaacccgggagacagatgttgcagtgagccgagatctcgccactgcactccagcctgggcaacaagagtgaaattccacctcaaaaaaaatattctataggcttatatataagcctatagaataggacagcttcactgtgtgctttttttgcagtgtgaaaaacatgctttcatgaagggattgactaagggatgtggagcagaggaaggaggaatgaggtgcgcctgggggtaggggcacttttagaagaggtcatagttaggggccagggacgggagagtgatcaccaggaaagaaaggaaagggagctgcctttgcgggcagccaggaggacttgagtggggcttaggaggaaggcagcactgggatatttgtttggccgacccattcaacagctattcccagacccgatggctcaggcttgtaatcccagcaatcagggaggctgaggcaggaggattgcttcaggccaagacttccggaccagcctgaacaacaaaacaagatggtgtcttgttctgtcacccaagctggagtgtactggcatgatctctgctcactgcaacctccacctcccaggttcaagagattctcctgcctcgcctctgagtagctgggattacaggcacatgtcaccaagcctggctaatttttgtatttttagtagagacagtgtttcaccattttggccaggctggtctcgacctcccagcttcaagtgatctgcctgcctcagcctcccaaagtcctgggataacaagcgtgagccactgtgccccacctcaaaaattcttttaaaataggctaagtgtggtggcgcacacctgtggtcttgggaggctgaggtaggagtatctcttgagcccaggagtttgaggttacaatgaagtgattgctccactgcactccaacctgggtgacagagcaagactatgcctcaaaaaaaaaaaaaaaaaattaacgaacactcctgccagttggaactcagctgagccttcatagttgaatgttgaatgaaagaattaatgaattaatgaagccaggcactgtgctgggtgctggagatgtggcagggtgcaggaccaagtccctgcccttgaggaactgacgtccagctgggagacagccaatgaacaaggcaaatgggtaaattacagggtctgtctgaggatggtcaatgccatggagaaggcaggaacggggaagggagatgagaaatgttacaatgctaggaggttggaggaggagatgcttgagcagacctggaggaggtgagggaagaagccagggcagatccgggagaggaccatctagacgggagggcgtcccagggcagaggtccacttggagctggagggtagcctggctgtgtgaggaacagggatagagggtgtggctggaggaaagtgagtgaggggagagggtaaaaagagagggcggagaactgcagggcgggagggggcgggtgtggattagacagtcactgtggactttggctttgactcagcctgagactggagcctttgagcagagaaggggcgagatatgatttaggctgtttgtttgtttgcctgtttttgagatagtgtctcactctgtcacccaggccggagtgtagtggcaggatcacagtattggctcaagcagcttcaacctcccagactcaggtgatcctcccacctcagcctgccaggtgtgcgcctgtagaaaatatctgcaaatcatattttttttctttctttctttcgttctttctctctttctttcttcctttctctctctctctttttctttcttctttctctttctttttcttcctatctatctctctctttctttctttctttacttctttccttctttctttttcttttgagaaagggtcttgctctgtcacccaggctggggggcagtggtgcaatcacagctcactacagccttaaactcctgggctcaaacaatcctcccacctcagcctcccgagtagctgggaccacaggtgcgtgctgccccatgcctggctaattttttagatttttgtgaagatgagttctcactacgttgcttaggctggtctcaaactcctgggctcaagaaattctcccaactcagccccacaaagtgctgggattacagatgtgggtcaccatgcccagctgcacatcatatttctgataagagattgatatccagaatatatagaaaacttccagaatacaactattttaaaaaaaaatccaatttttttaatgggcaaaaagaacttgaatagacatttctccaaagaacataataaatggccaataagtacatgaaaagatactcaactatccctaatcattagcggaagacacatctaaactacaatgagatattgcctcgcagctattagaatggctaccatcacaaaaacgaaaataacaaggattggcaaggatgtggagcagcaaacaaggaaaccttgtgtgctgttggtgggaacgcaacctagtatggctgttgtagaagacagtatggtggctcctcaaaaaattaaaaatagaggttgggtgtggtggctcatgcctgtaatcccagcactttgggaggcactttgagagagagagggacaatgagagagagaggtccctgaggggattggaacctctggttctgggtgtctctgtgctctcctgtcttggaactcatttataacaaatttccctttgtgtgtaaactgcctcaagttggactcctgccatatagacccaaaagaaccttaagagctacacctgccctgacaggatgcatcctgcattcctcctcccagagagagcattttgtcaagactagcttcagctgcaagtaacagaaaaccccaaaatcaaatggcctcaacaagatggaagtttctctttgacataaatggagtctggaggtagagagttcagggcaaatgtggcagtttcataatcctggggacacagcctccttcaattattactggcctgtcatcttcagtacataacttggggtccaagatggctgccagagctccagccatcatatccacattctgttcagtagtgaaaggattaggaacaaaagctatctttaaggccagctcctagtagcctcatataacacttctacttctatctattggccaaaagtcagccacatggccacacttagctccagggaacctagagaatatattttttgctggactcccatgcatccatttaaaaatcagggtatgtattaccaaggacatagaggatgtggacatcagaagcgtctcttccaaaaccttcttccttctgtagagatggtgggcatcctaaaccttcagcccctgagggtctctaaactgaaaagtttcctgacagacatttggagaactgattccaccaaaaactatccacagtgggccagtggatgtcactaacctggagcagatggcaacctggggaacaggcccaaggccaagcagccattaatcgccttttggagcccagccagaagaaactcttgataagaatcctagccccagccaggacaaggtccctgccctgcccagctgggagccaatgtgaatcaacaatccactcttcctgtgtggcagccagagggagtgtttacctggtgatcttcaggaactgtaaatggggtgagttccgatcttcttcacctccccaacccagagatgaaggatccagtcttgcacccccatctagacgagcccttatcttaccattgtcctcacccaaaatacacacctccacgaccaggggacaccattcacacagagcacaataaatggctcccaccaaggtgggcaaggcactggtcctgattctggtccacagccacctgggatgagaaggggatgtaagaactagattgagtggggtatcccccgctgtatccacttccagagaagggcagggcaaggtggagcaggatgagatagaacaataacaatagcttctatatatcattcacacaagatagattactcttgttacagcccaaatgacagggtcattgtagacaagcaacaggaagaatttggtggcaaatggcggacagtctaggagaagagcagagggcaacctggcccaggtagcacataactattctctcaggcatacctgttagggtcctgaccagctctctagatgagtgagaattgggagttgggagcagaaaccgttgggtattctttggacagttggagaaaagggaaagaagaatgggcatgggaccttgttctggccaatgcctagtgagaagaagtctgctgggggctgatgggagagattttattggatcttgaagagaactaggagcagcaattccccttttgtgtctctggatgcggctggccaccatcttggactgggagggaagtcaccatgagaggacaacctgttgaggctggggtaggaagatgaagaacctggatctttggtgttattactgagccattgtattaaccaaccgaggaactgccctttcattggaatccctgctacataagataatacacgtcagtgttttaaaccactttgaattgagttatccactttgtatggccaaaagcatccaaagtcatgtttgaggggctggttttctcgtctaaacacagccccggctcagttaagcataggatgggatgaggaacaggaacacaggaggcaaggaggaatgtccctgaaaatgtttgtaaatgtggggtcgacaccaagaggcagaggggaaactcaattaaaacttaaagactgcaagttgtcaccattgtagacgtctcagctttgcaagaagtcaagaattttccaaatgccactcttcaagagacaactgggcagatgtggatattattccaagatatgggaaaacctaatgtcaccattaacctttgaatgagatacagctgaaagtgacagattcttgagtccaaatgactggcccagattctcaggcgtcctagcacagcacaaccgaagttggcacttttctttcctactttgtttattcatcttggggatgcaaaacgctgcatgcatcatcttctatttattagtaatcctgttactcctatttctttcccatgttgtcacatttttaccgtattagagctgctgctttgttctcctctcaataccaaaaaatgtgattgcaagattttgccttgaaactctgggctgttgtaactcctggaaataaaaatctcagcagcataaaaaggagaaaatcattctctcttctgcaactatagaaaagcagacactctttccctcataaaaccttccttgtaaatgtggttctcacaaaggagtcctataagacacccagacttcagagactgctcttgctgcatcctgcaagagccacctctaacttcccaaagctgggctgattgtcttcatttctaatttgttattcctggtaatgacactcctttttcctaaaaagtacaaagaattatgagttttcattggccattctcccttcccctaccctcatagagctaaaaagaccacccaggactctgctagaaatttttattaaaacatatagataatgtaacagtcttgtctcatttaaatgaatattttccttcatgctgatatatggatggtggctgaaaacagcaagatgagaaaattgctttcatttggaatactattgcacttgtgtttcctaagatatttcaggggtcagtctggtgttaggacattcatgtgcttctgatttgattgaagattgaattaacttaaattcttttttttgttgttttttactttttttatttttttaaagacagggtctcactctgtctcctgggaatggctgggactggagtgcagtgacaggaaccgtaactcacggcagcccggaactcatgggctaaagcaatcctcccacctcagcctcctggtagctggaactacaggcactagctaactgcctagctaactttttaaaaaaatagatggagtctcactatgttgcccaggctggtcaggaactcctggcctcaagcaatcctcccaccttggcctcccaaagcactaggattacaggtgtgagcccctgcacctggcctaattcaatttctcagaaggcgaaggggacagatccatccctgggaaagacatctgactgttctatgatggaaaagagaaaggactctgactccattagtaccccacgatgatctgaagctgcgaaagtgacccatcagaggagctgctgtctccaccatcacaggcaggtggggaatcaaaaagctgctgctgttgctgctaactggaattgtcggctccagacctctgcagggcttgctgaattcacacaggcaagagcctctcaaaacacactggtgatgatacagaagatagaaagaaattatttaggcagatagtaagagcaacagagtccttggtggaattcctctttaacaaaaagcagccccaaaatcatttcttttctaaacaaagagcagcctgaaaaattgagctgcagacatagataagcaagctggaagcttgcatgggtgaatgctggcagctgtgccaatagaaaagggctacctggaagccaggtatgttcaacctggaggctccatcttcccttttgtttgttaccacatgtgcggttaaaaaaaaaaaagcaggcaacatggcactggccaggtagacaacccatctgcataatgaagctgggtggggcagccagcttctttgcgcgctatgcaaacggcacacttagtcctaaccagttcatcatgtgctatgcaaatggcacacctggtccgaccaatctttcgtgtcctatgtaaatcagacacagcctcctcaatctcatctataaaaccttctgcatttcactgccaaagtggcaacctattttctccagaacccctctctgtgcagagagctcttctctttctttcacctattaaacttcccctcttaatcttactctggtggtccatgtcctagttttctgtggctgtgagacagcgaatctcgggtatttaccccaggcaatgacactgtttcagtggtatctcaaaaaaaatctaaacgggtgtggtggcttacgtttgtaatcccaacacttttggaggccaaggcaggcagatcacttgaggtcaggagttcgagaccagcctggccaaaatggcaaaaccccatctctactaaaaatataaaaaattagccagacattggtggcgggtgcctgtaatcccagctactcaagaggctgaggcaggagaattgcttgaacctgggaggcagaggttgcagt[135 bp omitted]tgattccaggtcttgagatgataacttaactctttcaaccaattgccaatcagaaaatctttgaatccatttatgacctgtaacccctctgccccacttcaagttgtcccacctttctgggctgaatcagcgtataccttacgtgtactgactgatgtctgcctgtaacttctgtccccctaaaatgtacaaaatcaagctgtaatccaaccatctggggcacacattctcaggatttcctgaagctgtgtcataggtcatggtcctcacatttggctaagaataaatattttcaaatattttagagtttagcttttttcatcaacaaatgacatccttagtcctggccagaagtcagaaccaactgagagagagagacagatcagcatgtcatcagtatttcctaagcaatacgcaatatcagggaatgtggccaagctgtgtagcccaatgggtttgtcatcacctcctttgcttcctgtcgcctccaatctaaatatcaacataggatgtaagtttggatgctggtgatagattaaaaatagcaatggcttaaattccatagaaatgaatttctctctcctgtaacagtcctagctggtatgcagttctgctttgtgagggtatcatgagtctgtgctcttccatcttgttctctgctatccctatgatgctgagcttgtaaaccaaaaatacaactcaaagccgccacctaccacacacctaaaccatctgaacggactccctccttggccaggccactccaaatttaacctgaaagactggttcagcccatgacgggtgggatgggggttggggttggatgtgctgaagcagggttgttcgtcttgggtaatacccgagattcgttgcctcaagccaatgaaatcaaggatgtggacccacaaggagtgaggttaggagcagaggtttaataggtgaaataaagagaaaattttgctgtcttctgcagagagaggggggtcccaagagggttttccggtccatggtgaagtgcaggaggttttatagatgagtttgaaaaggcagtgtctgatttacatagggcacaaaatattggtcgaaccaggtgtgccatttgtatagcatgcaaagagctggttagggttaggtgtgccttttgcatagctcctgaaaaagctggccaccccaccccaatcttttattatgcagatgggctgtctacctggcctgtgccatgttgcctgctttttttttactgtacatgtggtgacaaagaaaagggaggataaagcctccatgttgaacatacctggcctccaggtagccctattctattggcacagctgccggcattcacccaagcgagccactactttggttatctatgtttacagctcagtttttcaggatgctctttgtataaaagacgtgactttggggcggctttttgttaaaagggaaattccaccacagactctgttgcccttactatctgcctaaacaatttctttctagctcctgtatgagtgcttcattatggccgcatcccttttggagttcaggaaaaacagaccagcatttaacatcgacacagacctgaagtctgataagaaacatttacaatccattctctctgaaggctgctacctggaggcttcatttgcatcataaaactctggtctccacaacctcttatcataactcagacagtcctttctattgataataactctttcaaccaattgccaatagaaaaatttttcaatcgacctatatggaagcccctcccccaccactttcagttatcccacctttctggactgaaccgatgtatatcttaaatgttttgattgatgtctcgtgtctccctaaaatgtataaaacaaagctacaccccaaacatcttggccatatgttttcagggtcacctgagggctgtgtcatgggctatggtcactcatatttagctcagaataaatctcttaaaatattttacagggccaggcacagtggctcatgcctgtaatcccagcactttgggaggccaaggtgggcagatcacctgaggtcaggagttcgagaccagactggccaacatggtgaaaccctgtctctactaaaaatacaaaaaacttagctgggcgttgtggtacacccctgcaatcccagctactcgggaagctgaggcacgagaattgcttgaacctaggaggcggaggttgcagtgatccaagattgtgccactacagtccagcctgggtgacagagcaagactctgtctcaaaaaatgtatatattttagagggttttcatcgacacgcttgttcccagggcccctagcgtgtcgcacacttgttcccagatcccccagcatgtccccacttccacctgaaggtagggaaaacaagaaagggagaactttattgaagggcatgacccagaaatggcacacaactcttctgttcacataccattcaccagaacatgctcacgtgactacagctgctgcaaggaaggctgggaaatttagtctttattccaggcaaccattggccaaacttaaactcctctaactatgaaaggactcgtagattggggaggcaccactagcttctctgccatatatatttacaaccccaatagttgcttcctctgctaaggcaggtacattatcacatagtaggaggaagcagaccaaactgtagtcgttctggagacaggtaaatccaaaaatgggaggagaggatctgagccaagtaagctcattttcttctcccagactcatcaaactcatagcaggggacaaaagccaaaagttttattccaacttcagatttctaactggggcagtattaatattttagctgagacaagtttctgttgtatgggacagtcccacctattattgcaggaggttttgcccaataaatgtcactactgtttcatcctcaggcattgtgacaaccaaactgtaggaagatgggctgggcacagtggctcatgcctataatcccggtgctttgggaggctgaggtgggaggattacttgaggccctgagttcaaaaccagcctgagcaacaaaatgagatcccatctccacacacacacacaaaatcaaattgtaggaagagatttccaaaacctctaggaggggcaggggatgccttcgactgggaaatataggggcatttgtaaccacaccagaccaatctgattcaacttttatgtaacaaagctgtaagttgtttttcagttgccacggactcccaggttgaaggtccataacctaagcatgcccaggtgaaccaaacgtgcaaccttgactgaaacccaagtactcagactgggaagtgaggattgaattaagaagtggacactgcatggcgggatccaggatccaatcacattgagccctggcatcaccccagggcacggtccaatcaaatcatgcctccccacatcacctcattacaagatccaatcagatcatgcctccctgcaaataattacaaatgtagtacgagaaacactgaggtttgggaaatgttcacaataaggcaagatccaatcagatcatgcctcattacccttgggactataaaacctgtcccaacccctagctcagggagatatatttgagcctgactcctatctccttgcttga[139 bp omitted]cggtgaaacaccatctctactacaaatacaaaaaattacctgggcgtggtggcgggcacctgtagtcccagctacttgggaggctgaggcaggagaatggcgtgaacccgggaggcggagctttcagtgagccgagatcgcgccattgcactccagcctgggcgacagagtgagactccatcaaaaaaaaaaaaaaaaaaaaaaaaattcccaaggctttggtgtgtggctttccattgtgtgcaggcaaacagacccagttcaggtcggtgacatgtccttctcatagagatgtgagaaatgtaggattccctcacacagggcaggagaaatgatgactgatggtacagggactcaaggagccgggagaacaggtcttgaccttgaatgtcagtaaattcattgtctgagaatgggaggaaggaagtgagactggctcacaagtttatgggtgggggcaggaaataaaatgtgttcagacccagtgagtgaaatttaaccagaggaagctgagctggttcttgggtataattatgagtgatctaggctttgtatatggcagtgaaggctggaatggctgctgagaaaattggaaccaggaactgaccaacgagaaataaacagatttccagagattgctcaaggtctgtttgaagctgggcacatggatttgtggaatatgatgaggtttttttttttttaaataacccaatcaatcttttattttttaatttatagtaacccccttttattttttgcctttgttaaatgcccagacatgccacagtaccaagcattatcaataccaactcacattcctttccttatttaaaaaaaaaactaactttctaactcattacaaacaccccttcccctttcctctccactttcttttacgtgcccaccttatctaaaaaaaaaccaaacgtttagccaaccaaaattagtttaaattgtacgacccaaccccagccaatggggaaagggtaaaagagcaagacttgcatgaaaaatagactctcgtgcccctttgctcaggtatgctctcatggcaactggccaaagagacacccacccctctgcacaaaaataaaattgctttgctaaaaatcctttgttcaagtgttcaatttccttaaaattttaaacgttattcctaacagattcaaagtggttccaggatggaagggcaagttcaacctgtttgttccttcaacctggaatgcacttccccacagccccacactctcacccaacaccgacctctcttcacctatcacagagccaaactcaggatcccaggtccaaatccctaagtccaaatcctgattttgccacttacttgagcgtgaacttggacaatttatttaacctccatgaatctctgtttcctcatgtaaaaaaatggaagcaatttctaccagctagggatgttaggagacccaaatgactttaaaaggttgttgcacttaagaacacagcctccagagcctgatacctggttctgcccagttattcagcagcttcgtggcctggataagtcacttaacctctctgagcctcagtttccttttctgcaataggagaacggcagcacctgcctcacagcgttgttgaaaggataaaagagctaaacgatgtaaagtgtgaagttacataaacgaatatatgtaatgctaatctatgcaaagagtaggactgggctcagagccaagttctccataaatactagcaattgtcatgactatttcctccatatgggctcctgctctttcagtgacacacaaaaaaattccacatggtatgtggacagatatgttttattttcattttgttactgtcatctacatttaaatataattagcatattcatatataatttcgtgggtgttattgtttaaaaaaatgagtgaacttattttagatgagtcattttaaagaaaaatgttgagtaaagaaaagtgtagccggaggccaggcacagtggctcacgcctgtaatcccagcacttcgggaggccgaggcaggtggatcacttgagatcaggagttcaagaccggcctggccaacatgctgaaacactgtctctactaaaaatacaaaaattagctggacatggttgtgggcgactgtcatcccagctacttgggaggctgaggcaggagaatcgctggaacccaggaggcagaggttgcaatgagttgagatcacaccattgcactccagcctgggtgatagagcgagactctgtctcaaaagaaaaaaaaaagggtagccaagtgcagaggctcaggcctgtaatcccggcactttgggaagccaaagcaggaggatcacttgtgcccaggagtttgagaccagcctgggcaacataggaagatcccaactctacaaaaaaatttttttaattagtcggtcatggtggtgtgtgctgtagtcctagctactcggggggatgaggcaggaagatcacttgagccaagaggtcaaggctgcagtgagctgtggtcacaccaccgcactccagcctgggctacagaaggaaaccctgtctcaaaaaaaaagaaaaagaaaagtgtaggtgatgtgtgcatatggaaagaattacgaatgtggtatgagaaacactgaggtttgagaaatgttcacaataaacaaagcgggacatcagttaaagctgtgaaaaggatcttattcagtaaccactggcagtaggggaaagagctgagctccgttcagattcctgcagaggtggctgggtgtctagaaggcagaatgagggatggcgagagaagggcactgcaagtaaaaatcataaaaagttggctggctcatgcctgtaatcccagcactttcagaggccaaggcaggtgaatcacctgaggttagaagttcgagaccagcctggccaacatggcgaaatcccgtgtctactaaaaacacaaaaactagctgggcgtggtggtgtgcacctgtaatcccaactactcaggaggctgaggaaggagaatcgcttgaacccggaaggcagaggttgcaatgagccgagatcatgccactgcactccagcttgggcaacagagcaagacaccatctaaaaaaaaaaaattgtacagtgtcaatgggattcagccagctgtgtctgctagctggcaattgtcatagttagaattctatcctcccgcagagactgggagatggaggtcctctccttctgacaattctatttcaaaggaatggctttcagatcctctagaaacacccctgagttgtaggatatagatacatatacacccatgtctgaaaaaggaaggagtcataattgtaggcccttcttagtaaatgctctgaaaagggaaattaggggtatattgccagatattggctaggtcagacagtaaattctcctggcaaggtagagctttctcgggtggtattttaactgggggctggagtcatcctaagaacacgaccttatgctgc[134 bp omitted]gcagcctcgaactcctgagcgcaagcaattctcccacctcagcctcccaagtagctaagactacaggcacatgcatgccaccatgcccagctaatttttttatttttttgtagaaatgggggtctcattatgtttcccaggctggtctcaaacacctggcctcaagcaatcctcccacctcagcctccctaagtgctgggattacaggcatgagccaccacacctggccttggtcatctcttaatgcagaggtttacatggagttctgcagtcctcagaaacagtgacctgctaagttctcctcgtcctgcaggggtccgcttcaccgtctcttccccagagtcttcccttatccagcctgagtctcagctagattgagagtcagatcctttcaaagctctgtttttcatctttcctttccattaaagttctttcttttctttttttttttttgagaccgagtttcactcctgtttcccaggctggagtgcaatggcgtgatcttggctcagcacaacctctgcctcctgggttcaagaggttctcctgcctcagcctcccgagtagctggcatgcaccaccacgcccagctaattttctatttttagtagagacagggtttc[132 bp omitted]aactgaatcccaaaacaaactgacttcaggggaaacaatgagaatacacagaccagcatagcacacaagctgaaggatcagtatggacatcaggcacagctgaatctaggtgtttaaatgatgccattagaaatctctctttctgtgcattgactatgctttcacatgtgttggcctcgtttttaggcaatctctctactcatgatagaaagatggcccccagcagctgcacactgagatctcttcagctcagcaaacccggaagcaagaaaaaatgcttttaggctgggtgcggtgtctcacgcctataatcccaccactttgggaggccgaggcaggtgggtcactggaggccaggagttcaagaccagcctgggcaacatagtgaaagactgtctctactaaaaatatgaaaaaattagctgggcatggtggcacatgcctgtaatcccagctaatccggaggctgaggcatgagaatctcttaaaccccagaggtggaagttgcagcgagcagagatcacaccactgcactccagcttgagcaacacagcaagactctgtctttaaataaataaataaaaatttaaaaacagaaaaaagaaaaattgctttattccccagagttccaataaaatccgtaagagattgcttctccttggcctgttctgagtgccacgcccaggtctccaaaaatcactgttgtcaggggatgaagtgctctgattggccagtcctgggcccctcacctccctggagccatgaggaggctggtttccaaaagagaactccaggtgctgttacctggatacaagagagtactggctgggtagaaaccccagaaaccttacaacataatggttattaactgcatcgtaaatatttactttttcctacagtggtctcctgacctagctaatcactccagcagaggccttcagaccaactataaaaaaggcactttagcaaatgctaataaagaaataactgtgtcacctgataatgactattattagagacttatgggtgaaccttagcccctgggtggaacctgaacctctctgggagggaaaagcatgagcttctaagtcagaaagatctgagttcaagtctgaacactcccatttcactcacttgctcttcattcatttattcactaaaaagaaaacatgtaggctggctaggtggttcatgcctgtaatcccagcactctgggaggctgaggcaggaggatcacttgagcccagaagtttgagaccagcctgggtaatatagtgaaactctatttctacaaaaagaaaaaaaatttaattggctgggaatggtagtgtgagactgtagtcccagctactcaggagactgaggcaggattattgcttgaatccaaaaggttgaagctgcagtgagctatgaccgtgccactgcactccagcctggctgacagagtgagaccccgtctcaaaaacaaaaacatgtattgagcacctgttatatgcaaggcactgttctagtcactagggacatagccacaagccagacaacatccctgccctcctggatctgatattcaagtcggagaggtgggactaaggagggagagacagataatacaagtggacaaataaataaatcatctaaaatagcggtaaatgatgtaaagaaaacaaaacagtgtggcttgctagcaaagaggtggggaactgagttgcagcaggcattaagaaaggcctttttgatagagtgatgtgtgtgaattaagccaaaataataagatacagtcagctttgagattacatgagtaaggttctaaggagagggaacggctcatgcaaagcccctgagctggtgcctccaaaaactggcagaaagcccctgtgaacggttgtgtgatggtaggtgagttacttagcccctgtgcaccacgagaaaatggggatgctcatatctacccctcgaggttgctatgaggattcaaattaggcaaccctgttacaaggttaatgctgtgtccggcatatagtaggtgttcaataaacaccagctattagtttgagtaatataattattaatttgaggaggaaagaatggacctggggagtgagaagggtgaggaaaaagtagctagtgtagcttatccttctagaatctaaaattcaggatatagtctgagcaagctcctgataacgggattctaaacatgcctccaggacatcctagacaccaaattataattagcattgacttcatagtgactgccattcgttgagcgcctactacgtgaccaggcactactccaagcaccttgtgtccacggccctgtctgactctggggcaggcactattattaacgcctccattttacagaggagaaaagctgtggttcagagtccaaagccccgtcacctcctaccaggttgacctttggccattccttgcctttgatgtgagtgataggagcgggcgattctgcttctccctccatctcccggcggggattgtacggtgagagaatgagagcaaaacctcagagcccccttcccaggaaccctgtcccagcctggtccccacccaccaccaccactgacccgatgctagagaaggatgcggctggaggtgacttcccagccaacttggtgtaagtcatgtggggaagtggccagggtagggcatggtcatcgtgagcagggtcctgcagggtgaggccggggctgcagacgcgactgtacaggtctatgaagaccccatgtgtgatgaggagaccttctctgcacagtccctggacagaacacgagatgaggggtcctctggacgtcagctccagccacacccctacctggaggaagctgcttttaacaggtgcgttggagacagcggcttcaccacgggccagggacaaggaggagagtgtctccttacgagtccaagtcacccccactcagagctttgaccctgtcagtttgaggcccatgcagctcaggcacccaactcatgagaactcttgaaggccactccgccacaagagatgaccctattggcttcttttaggaagaagggaagtgaggcgcaaagaggagaacaggtcacctacccaagatcacagggctggcaaggggcaggatcagaatttgggaccccagcccagcccccttccaccagaatgccctgtctcacccctgcaatccgcaacttagtaataatacatataaataataacaatcataaaataataacagccgtaatagaaggtcactgtaactgaatagatctatataccagcctgtttggggtttttgtttttttgttttgttttgttttgagacaaggtcttgctctgttgtccaggctacagtgcagtggcccgataatgactcattgcagcttcaacctgctgggctgaagctgttctcctgcctcagcgtcctgcgtagctgggaccataggtatgcgccaccaaacccagctaattttttatttttagtagagatgaggtcttactatgttgcccaggctagtctcgaactcctgggctcaagcgatcctcctgcctcggcctccccaagtgccaggattacaggcgtgagccactgcgcccagcctgtcagcccgttctaagtgctttcctatagtaacatttacctcttatcacaactctttgagatcagagctgtacgatccctatttcacagaaggggaaactgaggttcagagaggtcatgtgccctctccaggtcacacacttggaagtggcagactgaagatttgaagccagatgggctggcttcccagaccacactttccagagaccacacacatctgcctctcagatagtgaatgaattgcttc[211 bp omitted]gaggcaggagaatggcgtgaacccgggaggcggagcttgcagtgagccaagatcgtgccactgcactccagcctgggcgacagagcacgactccgtctcaaaaataaataaataaagttcagttctgagccgggtgcagtggctcacgggtgcagtggctgggattacaaagtgctgtaatcccagcactttgggaggccaaggcgggcggatcatctgaggtcaggaattcaagaccagcctgaccaacatggagaaaccccgtctctactaaaaacagaaaattagctgggcgtggtggtgcatgcctgtaatcccagctacttgggaggctgaggcaggagaattgcttgaacccaggaggcggaggttgcggttagctgagatggtgccattgcactccagcctgagcaacaagagcgaaactccatctttaaaaaaaaaaaaaaaaagttcagttccatgtaattttaaaacctcaaagtccacctagttcaaagctttgctctgtccccagctcaggcaggtgtcacactggaaggaggaaagggacgtggtgggcctcttccctattttgtcagagctgttgtctgaggcctctctcagggcggagggcagaggggaggaaggaaagaaaaggagattggaaagtttctcctaggctgctgtagttttgtgatggaaacacggcatgctgtgtgttgctggatcttcctgggggcgggagggtggggtactttggaaattggctgtgccactggataaaacagcaaccagtttttagaaagtggtttacaacatgtttgcaaagtgagctgggggagcttacaaaacattgtccaaaggaaaacaaagccacagtgcaacgaacttcaactctgtaaatacaaaatgttctcttgataacagcaggtacctcgagagtgtgaccaggacaagcgtaggggtggaggtcaaagggatatttggctttatatgggtctacttttttttcctaaggagaagctcttgagtgattaaaaattaattttaaaaattatgaaaaaccttcaaagaaaatatactccccaaagtggttatctgagtattaggcttaaggatttgttttactgctttttactttactttccaaattattctataatgaggagcagacgttgttttttgtgatgccttgtaagaattgctgaacataattctactttttgtttaaaagaaatagaaacagccaggcgtggtggctcacacctgtaatcccagcactttgggaggcccaggcaggcggatcacaaggtcaggagattgagaccatcctggccgacatggtgaaaccctgtctctactaaaatacaaaaaaattagctgggcgtggtggcgcacgcctgtagtcccaactactcgggaggctgaggcaggggaatcacttgaacccgggaggtggagcttgcagtgagccgagattgcaccactgcactccagcctggcgacagagcgagactccatctcaaaaaaaaaaaaaaaagaagaaggaaatagaaacaataacaagcataaagcttgaaaaaaaaaaacagtaaaagtttccaaaacatagtgtttatttctaggagtctaagttttctgctataaaaatggaaataaataaatatatatatatgagtatatatgagtaataccatatatgtagagagagagagggagagagagaaaaagagagagagagagagggagaaaggtcttgctctgtcacccaggctgcagtgcagtggcaggatcatagctcactgaaacctcaaactcctggacttgaggaatcttcccacctcagcctcctgagtagctgggactacaggcgcgtgccaccatgcccagcgaattttttatttttgtagagacagggcctcactcagttgcccaggctagtcttgaacttctggctcaagtaatcttccagccttgccccacccctccccccgcccccgcaaagtgcaggattacaggtatgagccaacacaccggcctactcttatattaaaaaaaaaaaaaaaatgcctatcaggagtgaaaggattaggtgtggtgcccaagagacgcagggattctttttggggtgacgaaaatgtccttaaattgcttgaggtgatggttgcccaattctgtgagtatactaaaagctcttgaattgtacgctttaaatgagtaaattattggctaagaaagtagattttatgtgttctcaccacaaaaaaaataagtacatgaggtaatgcatatgttaattagctcaatttagccattccacaatgtatatgtattttaaaacatcacattgtacaccataaatatacacaatttgtatttgttaattttaaaaagaaaaaatagtggcaaggttataacttaatcagtgtccagaacaaacattatgtcaccctttaaaaatgtaccattcacattgatttataaccctttattatttctaaataaggtggtgagaaaatgttgggtgaggggttgggtaggagtaaatggagcaaagcagatcccagaaccagaagacattagtagtatatggagagagacactcaacaggagctgtgggctggaacagaaggacccagccaactgtaggactaatcccttcaagcttactcccccgctgccctctcctcttctgccaacgtgcccactgacagaaaccaaccagcagcaaaaggtaaggggaccccaacaacacagctcagagaagtcagcctttcaggcagcagagtggagcagagaagggtagaaaaccaatttttgcaacatccagtataatatacgtgcgtgcttcaaggggtcaaggagaggaatcaatgattcctcctccttccctgctcttccaaggcgccctgctcacatcctgcacctgctctgccttctcagagctgcccttctcggcacagctgaacaccttgaccgaaggagccagtgtccatcttcctgtccccggaaggcttgaaggcattctcaccacgtcttggttctgagggtatgacgcccagccagcagccatgatattctccccgaagggcctcccaggacctgctcacactggccgggagatgctgggaacccaaggcagcctggtcattagaaaatgacggctcaggactcgggcagctacaccgtcgtgctggaaaccagcaggggacacaggagtgtgacggagcagatccatgtcaagagtgagtggggccccgcagtgggaggggctgacttctcagaaagcagacccactggacctcagaagagcccaccaggacactttgcatgctggttatccattgctccccaataaaccaccccaaaacttaaaacatcaatcacttatctagctggacagttgttgtgttcagctgttggggtgtctgggtgttggctggtccagaatgacctccttcatgtgcctggccatggaccagctggtggctggagtgatggggatgagtgggccacatagcctcccaacctccagcaggctatcccaggcttgttcactcagcaatggaagaggaacaagaggtaaagctgcaaaactccttcaggcccaggctcaaaactgaccaccatcacttctgccaccttctattggtcaaagcaagtcacatggccagcccagcttcaacaggaaggaaaaaggccccacctcttaaggagaggagttgcaatgtgttgtggctattttttgtcgttgtgttagattgttcttccattgctataaagacatacctgagactgggttatttatttaaaaaaaaaaaaaaaagaagaagacgtttgattggctcatggttccacaggtggaagtgtaatgccagcatctgctcagcttctaaggagccctcagggagcttttaatcatagcgaaggcaaaggaggagcaggtgtctcccgtgagaacaggagcaagagaaagagagagtcagagaggaagtgccacattttacaacaatcagatctcatgagaactcactaccatgaggacagcgtcaagccataagggatccgcccctgtggcccaaacacctttactgaggccccaccaccaacactggggatcgcatttcaacatgagattttggcagggataaatatccacattataacagccaagacttgcaacagacattcatgagatacgcattcatcatcacttgggaaaggtagagaaggtctggtagcagccttcaacctcatctatatttttatcacctggactcaaactttcatatctgaattaggaaaacaaagccctgagagtaaccagacccatcctccttttagaagatagtccagagactgtcctagtcggctcgggcaaaatactctaggcttaatcaacagaaacttattccctcacagttctgaaggatggattgcaagatgaagctgctggcaggtttcatctcctctgaggcctctcttttttgacttgcggaagggtgccttctcattctgtccttgcatggtctttcttctgtgtgtgcacatccctggtgtctctctgtgtgtccaaacttcctcttcttataagggcaccagtcaggttggattaggacccaccctaacaacttcattctaacttaatcacctcgttaaagaccttatctccaaatacggtcacattctgaggtactgggggttagggtttcaacatatatgtttggtgggggactcaattcagttcataacagagatcaacttagttagggttcagattctgatgctctaacaaagactcaaaaagttccagtgtcggccaggcgcagtggctcacgcctgtaatcccagcattttgggaggccaaggcgggcagatcacgagttcaggagttcaagaccagcctgaccaacatggtgaaaccccgtatttattaaaaatacaaaaattagccgggcatagtggcaggcgcctgtaatcctagctattcaggagactgaggaagtagaatcgcttgaacctgggagtcggaggttgcaatgagccaagaccatgccactgcacacttagaaccccacttctgcacagaggggtttttactcccctcccagagaatttatggaccgctgaggttcatccatctgtatttctgtgatttgatgactaattttgtgtgtgtgtgtgtgtgtgtgtgtgtgtgtgtgtgtgtgtgtgagatggagcctcgctctgtcgcccaggctggagtgaagtggtgcgatctcggctcactacaacctccaccacccgggttcaagcgagtctcctgcctcagcctcctgagtagctgggatcacaggcgcccgccaccacgcccggctaatttttatatttttagtagagacagggtttcaccat[139 bp omitted]ctatgccattctcagtccgaagggccctttctaaagagagaggttgcaggaactcacgctcggtggtgcaggctgtgtggccagaactccctggatcaaatccctctggcatctgttatgcccctgagtccctgcaaaaaagtaactttctgttttgcacttcagtttccccatctgtgcaatgaggtcatagtggaacctacctcatagggtgactgtgaggagtaagtgagttaatcagtgctaaatgcctacaacaatgcctgacaaagagcaagtaaatgttagccctggccaggtgctatggctcacacctgtaatcccagcagtttgggaggccgaggtgagaggattgcttgagctcagaagttcgagaccagcctgggcaacatgatgagacgcccatctcaacaaagaatttaaaaattagccaagcctggtgatgtgcgcccatagtcccagctactcaggaggctgagatggaaggatcccttgagcccgggaggttgaggctgcagtgagctgtaaccttgccactgcactccagcctgggggacacagcaagaccctgtctcaaaaaaaaaaaaaaaaaaatagccctgtttgtttcaaaggacttgacttctttgagccttccttttctcatcaaaatgggaataaggccggcacggtggcttacacctttaaccccagcactttgggaggacaaggtgggtggatcacttgagcccgggagttcaagaccagcctgggcaacatggtgagaccccatctctacaaaaaatagctggatgtagtggcgcacgcctgtaatcccaactactctggaggagactttgagcccgggaggtggaggttgcagtaagctatgattgcaccactacactccagcctgagtgacagaacaagaccctgtctcaaaaaaaaaaaggaataataataattacttcataggattgttgtgaggattaaatgaataaatccagtggctttcatgagaaatgcttttcacatcatgtccagtatatcccacaactaaccaaaaggcaagtgtagtaacagttattactatgagtaatgctctctgatgttttctataatatttcttttcatgttttgaatgttgatcacagtctactaatgatttagacacctgggcatgggtctcgcatgcagtataacaagccatggattaacacgtgtgc[141 bp omitted]tccactaaaaatactaaaattagccggatgtggtggcgggtgcctataatccagctatagagaggcagaggcaggagaattgcttgaacccagggggcagaggttgcagtgagccaagctccagcctggatgaaaaagcaaaactccgtttcaagaaaaaaaaaaaaaaaagagcccaatccaggtggctgttatattgcctcttgtttgtacacctagtgggctctttctcctccttcaaggcttaactcagacacctcctccaggaagcctttcatgaggtctctggttgtgctaaagttcttttcacttataacattgcattgaaatcagaaatcagctctaagtggaagttcccagcacagtctgggagttcaaatcccagatgtgtccctactagaccacgaagcctggccctaatgagccccaaacctcagagcctttcacctgaaaaatgcagacaagaagtggggacctcttgggtcacctcctcgctgggctgtttccactcctccaaacttaaagtcaagttctcacatgatagccagagtgagcctgttcaaacctaagccagctcacgtccctcctctgggcagtcctcccatgggtcctactgcactcagagtcaaaatcagagtcctcaccctggcccaggaaaccccagcatgatctgctcccattatctctctgacttcttctcccagccctctctccctttccctcctctctatgcccaccttggctcacacccatctcagggccttttacttggtgttccctctgcctggaacatttttttcttaggaatccacatggcttattcctctgcttcttcaggactctgctcaaacataacctccccaaagaggtcctccttgacccaccttacctgaaacgggtttaccccacccccagtccaaccccacagccctgtgcagttttcctcacagcccttaccaccactatatatacttgtcagtttgttgaccctctcctcactcaatcgtaagtttcatgagggcagcaacagcgtctgtttaatcactgctgagcccccgagtcctagagccttagagtcctagatttggttcacccagatccagaggcgaggattcaaggacagatagtctgtttgggaggtgcaaggaactcgagagtggggaagttaggcagagaaggcaggaaataataaaagctgtgttcccaagctggttaccatgggcaactggagcacagtcccattggggaactcaggccctggtgtggaatgactctgcagagttatcccacatagcagagagggagctggggaatttatataccaacgtgtcctggcattgtggagggctgctccctgatgtgctcattccccagcacttccagcctgctgcctccatgggcagagtaggctttggccaccagtgaaagtcctcaggcaacgggatgcaggtgctggccgttggaagtgggaagggcaaggggttggactgggggcactgggcacagaccaggctcttcaaacacattcatgggtgaattaatgaatgaatgaacacatgaaagaatggatgtctctatggtgggcagaagaaatgcccagcttttctgagtggactccactcttgtggccttgttccctgtttgcacagacagcctccaactaatgccactgaagacattcccagctgctatccggggagtcatccagagtgagctcaactattctgtgatcctgcagtgggtggtgacaatggaccctgagcctgtgctgagctggaccttcagtggggtgccctgtgggatgggagagaagctgttcatccgacggttgtcctgtgagcagctgggcacctacatgtgcatagccacaaacagcaagaaacagctggtctctgagcctgtaaccatctcgctgccaagtgagtcccccattccaccccaccccaccccacccaagagccctgcaccctctccagcctgtggcagcctctatgattccattaagccacctactatgagcagtcccctgtgagaccctttataggcaaaatgtcattccaatgttccatccacctggcggactgtggattattaggccactttcttcttctttcttctttcctcttcttcttcttttctttcttcttctttttctttcttctccttcttttcctcctcctcctcctccttcttcttccttcttcttctccttctccttcttctacttcttcttcttcttttttttttttttgatagagtcttgctcggtcacccaggctggagtacagtgctgtgatctcaactcactgcaacctctgcctcccaggttcaagtgattctcatgcctcagcctcctgagtagctgggattacaggcatgcaccaccacatctggcctatttttgtatttttaggagagacggggtttcactgtgttgtccaggctggtctcgaactcctgggctcgagtgatccacccaccttggcctcccaaactactgggattacagacatgagccacctcgcccagccaattaggccattttcagatgacaggctgaggctcaaagaggttaactatgatgaaagcccagcttaggatctggaccaggctacctgggtccttggctccaaccatttgcttgttacatgaacatgggaagcctctttgcctctctgagtctcagcacatacctacaaaaaatgcagatcaaaatctaaggagtgggccaggtgcagtggctcacacctgtaaccccagcactttgggaggctgaggcaggaggatcacttgagcccaggagttagagaccaacctggacaacatagtgagaccctgtctctaccaaaaaaaaaaaaaaaaaaaaaaactaaaaatttaatcaggcatggtaatgccacctgtagtcccagctgcaatgggaggatcacttgagcccaggagtttaaggctacagtgagctgtaatcgcaccactgcacaccagcctgagtgacagaggatgactgtctcaaaaaaaaaatcaccattgtcatcatctaaggagtggttcaaagcaatggctttggaatttgaatccctggctgtgtgactctgagccagtgccttgacttctctgtgcctcagtttcctcatctataacactgggaagataatagtgcctaccccagtgtgtagttgtgagcattcaatgagataagccggtgaatagcttaaaacaataatgtctagcactatcgaacactaatgagtgctcaataaccgtgagccaataacactgttgcaattagcattgtcattattaattgtagctattaccatatacagtcggtatatggagccctaggtggcaatcaaaatgacagcaagttgttgagatcagagaagtggtttgggacctggtcaaaactcagttcagtccctgttcccgtgccttcctggctgggtaacttagcgcaagtgacttcccctctctgagccccagtttcctcatgtgtataatggaggtaatcctatatacctcttcagggttgttataaggaacgaaaacaaggggtgactgagtttggcagaacaactgtcaggcagcaggtgccttgaatagcagctgttatggtgaatattgtttttagtgtgttattcatggagggacacatggtgatatggtttggctgtgtccccacccaaatctcatcctgaattgtagctctcataatccccatgtgtcatgagagggacccggtaggaggtaactgaatcatggggtcaagtttttcccatgctgttctcgtgatagtcaataagtctcacgagttctgatggttttacaaaaggcagttcccctgcacacattctcttgcctgccgccatgtaagacatgccttgctcctccttcaccttctgccatgattgtgaggcctccccagccatgtggaactgggagtccattaaacctccttttttttaataaagtacccagtctcaggtatttcttcatagcagtatgaaaatggactaccatggcttggagtgaactagaggtatgcagaggaactggccaggagagaagagagggagggtatttggggtaggaaagaatgcatgagtcaaggttcagagctgggacatggaaatggaatgcgtgatgggaatctcagcttggctgggtcccagagaaccacctcacctccctggccagggtccagtgggagcttcagggctgatgcactgggggaaaaaatgtaaatcttatatcacctagtgaccctgatattcagtgagaaggacaatacttccaagacctcctttgctcattcatcaactgcccaggaaatgtttatgagcacttgctgtgtggccagcccacacagctgggaacactctggtgaccaagacagctgcagccctgccttcacaagacttacagtccagtgtccacagacagtgatcaccagagtgggcagggctgggatgggggagcccagagagctatgagactcagcctaggagttaaggagggcttcctggaagaagggacacctgagctgagaattatgcttagctggccaggtacagtggctcattcctgtaatctcagcactttgggaggttgaggcgggtgggtcacttgaggctaggagtttgagaccacgctggccaacatggtgaagtagatggtgaagaagatggtgaaaccccatctctactaaaaatacaaaatttagctgggaatggtggcatgtgcctgtaatcccagctaccagggaggctgagacacaagaattactggaacccaggaggtggaggttgtagtgagctaagattgtgccactgcactccagcctggtgacagagggagactctgtctcaaaaaaaaaaaaaaaaggaattatgcaagccaagagagagagatggcattccagagagacagtgcagcatggacaggcctggaggcaagagagaaagaaagggatgagcttggaaaattgagtggagtccagggttgcatggctataaaggcagggcaatgagagagatgaggctggccaggtggcagggcctcgaaggctaaggtgagaaactgacttctgccccagggtgctgggaagccacagcagggttctgagcaggggaggaacagggtcaggtgtgagctttagaaagatcctcctggcttccatgtggtaggaaggtggatgggtgctggactagggcaggagagcagggaggagagggggccagagacctggaggatggaagagaaggatggattgaagagacacttgggagggggaatggcaggagggaggggtgcacagggagggcgggcagatggctcctccaatctcacccctccttggtccccagaacccatcatgcagcccacagaagcagagcccatggagccagaccccactctgtccctgtcaggaggctctgccatcgggctccttgcggctgggatcctgggagccggggcactgattgcaggcatgtgtttcatcatcatccagagcctaaggtacctctatccctcacccccgtccactgggcaacatccactcagcccccatggggcacagagctggctcaacaaggaaacagagatgaaaccaacacccccatcagggagggtgatagcgactcctgaggagcccatctgactcactggtttccaaaatgggatcacagcaacaaagagatagaagaggacactagagctgggctgtctggcttcaagtcccagctctgtaacttactagcagtgaggctgtgggcaagccactccccttctctgtgcctcagtttgcccatctgcaaaatggggatgataataatagcatctgactctctgggttgttgggttgggttgttgtgagtgaatttttctttttctttttttttttttttgagatggagtcttgttctgttgcccaggccggagtgcagtggtgcgatctcggctcactgcaacctctgcttgccaggttcaagcagttctcctgcctcagcctcctgagtagctgggattacaggtgcataccaccacgcctggctaatttttgtatatttagcagagacagggtttcgccatgttggtcaggctgatctcaaactcctgacctcatgatctgcctacctcagcttcccaaagttttgggattacaggcatgagccactgcacccgtccagtgagtgaatatttctaagaaacttaaagcagtgcctggaatgtggtaagtactatgttcgtcctctctacacatatctgcagtgaccgctctgtgccaggcactgaggataccgagggaagaaacagcagaaagaccctgccctcatggaacttgcatcctggtcggggacaccatcaagaaacacaatgaa[131 bp omitted]caagacatcttgtcatctctctcaaaatataaaaattagccaggcatggtggcatgcacttatagtcccagctactcaggaggctgagatgggaggatcacctgagcccaaggaagtctagactgcagtgagctaggatcatgccactgcactccacactggacacagagtgagaccctgagtcaaaaaagtaataataataaatcttttaaaaaagatagtatgttggatgagcgctaaggagaggagtgaggctgggaagcaggacaaagattgtggagtggggtggcatttaacgagtcagggaaggcctccctgggacagtgacatttgaacaaagggagggagtggggagccacgtgagggtctgaaggaatggcatatccagcagagggaacagcaagtgcaaaggccctgaggcaggattgcctggcatgttcaggaaatagtgaggagcccagggtggccagagtggtgtgaagaatgggcagagaagtaacatgtgggtcagagagggagtagggaggcaggggaaggcagctagacccttgcataaggccttgtaggctctctgagcacttggcttttgctctgagtgagatggaagccatggagggtctagtgcaagggaaggatggcatctgacttatatttgatcctatatgttggctagtactacaacgctattaatatcttaccatcagcaaggcatggtggcccacatctgtaatcctagcactttggaaggccaaggcaggaggatcacttgagcctaggagtttgagaccggcctgggcaacatagtgagaccccgtctctaccaaaactaaagttttttttttttaattagctgagtatggtagcacgtacctatagtcccaccacttgggaagctgaggtgggaggattgcttgagcccaggaatttgaggctgcagcgagcgatgatcgtgccaccacactccagcctgcttgacagagcaagaccctatttctaaaaattaaaaaaataatgtttttaaaaaacttgatcttaccatgtattgagcacctattatatgctttcttttttttttttttttttttgagacggggtctcactccattgccaggctggagtgcagtggtgcaatctcggctcactgcaacctccaccttctgggttgaagtgattctcctgcctcagcctcccaagtagctgggactacaggcgggcaccaccatgcccagccaatttttgtatttttagtagagacggagtttcaccatgttggccaggatggtcttgatctcttgacctcatgatctgcctgccttgcaaagtgctgggattacaagcataagccaccaagcattactctatttaatctccataagagctggggaggtgagggggctgtggtaggggtgaagatctcatttcagtccagagagtagtgatctgcccagggcccacagctggagagaaaggattcaagcctagactcctgcctgccactttgttctagctcctgtctacactgccttttccaccatcagtaactgtacagacctctgtaatctatgttgtgaggaagagaaatctgtaggtggtagtggtttagggagacattgtggaccagctgggaggaactggggccaggtctccatccatgagtcctgcacacaaccatctaggggcaagggagggccagcctgcagcctcggccacccagattgccttcatcattgtggcagctccgatgtcctggcccctcagcacgtaccaggtgctgaaagccccaactctcagggctaggtgctattattgtcgtcatttcccaagtgagtagagctaacgctcagaaaagctcattaacttgcccaaggacacacagcgaatgaatggctggccctgaatcaaaccctgatctaagtctacagaggggaaaggtgaggagtcaggctggcatgaaaatcctcacccaggcacctcaagtccctgccctcatgagcaggcaagaagggtcactttctgtcttccccgcccttgtggccaagacctatttagttgtgagcaacagactcctgggacaaggccaatgggggcatcagctggaaggagctagcctcatccaatcagctgtgaccttgcagatgaggccacgtgtcatggacatggctgccttgaccctcccagtgaggaggaacatttctcagaaaagaagtgtatatgggctaggcaggaaccccatgcatgcctaccatgcccaccaagggccaggagagatccccattgtttgtagttgaggagagggacctgaagccaggctacttatattcacatctcagctctgctgtacatgaccttgtggaatttgggggagccctttaacccctcagtggctcatctgtaaaacaggaatatggcagtgtgtggtgctcacaattgtaatcccagcactttgggaggctgaggcaggaggattgcttgagtccaggagtttgagaccagcctgggcagcatagcgagactcatgtctctacaaaaaaaaaaaaaggaaaagaaaaattcactgggcatgataacacatgcttgtggttccagctactcgaaaggctaaggtgggaggatcgtttgagtctgggagttcgaggtggcagtgagccattattgctctactgcactccagcctgggtgacagagtgagactctgtctcaataaacat[133 bp omitted]aaaaccccatctctactaaaaacacaaaaattaacaaggcatggtggtgcatgcctgtaatcccagctatttgggaggctgaggcaggagaatcatgccaagaccagctcagtcagggaaactctaacccagcggtgctagaggaattaaagacacagaaatatagaagtgtgaagtgggaaatcaggggtctcacagccttcagagctgagagcctcaaacagagatttacccacgtatttattaacattagcattgtttctatagattttagattaactaaaagtatcccttatgggaagcaaagggatgggctgaaataaaggcatgggtatggctacttatctgcagcaggagcatgtccttaaggcacagatcactcatgcggttgtttgtggtttaaaaacgcctttaagtggttttccgccctgggtgggcaaggtgttccttgccctcattccagtaaacccacaaccttccagcgtgggcgtcatggccatcatgaacatgtcacagtgccacagagatattgttcatggtcagtttcggggccagtttatggccaggttttgcgggggggcctgttggtgcaatttaagctaaacatccctttaggggaccaattaataatgattccataggaatcgttgtgcagcacctctgcctgttctgcaatgcaatcttcctaaacaagtatgttcattttttctggccaggttcaattttgttacagataggtttttgagggcagtatgcctcaattataggaggagatttgttatggtaaatactgagatcagaaagcacatgtaactgtgtcatagagtgattacatccaggcattattgccagccaagattgatgaatatgcctaataagtataattgttctctgtgtcagcccttctttaaggaatactcacggcaatggtgattaccactatcatagctaccattactcattctgagtggttgtcccgctttcctcaggttttcttccatcatctgtgacagcttcttgatctgtctccagctgggtggctgtgttcgacgggtgtttctcgtgacagttggggtcctcctcagcatcagcctcgacatggctgcaaccggggggtcctcaggatcctcccggagtctcttccttggcatctggctcatgctaaaatttcaggtgtcttgatggtatccaaatcagctgttcatgttggcctggagaaacacaagcataaccaacaccccaagttattattttacctacttcccaactttttgttattggatctctccaccaaaccaattgttctgcttctgtctttgcagctggtttctgtagatgctgttcagctgctgataacatctggcctttgggcaggctcaaaaaatttaaagttaataatgctagactcaattgtgtatgggctgtcccataatccctgtttctccctcttttttgtttttgtcatcagttgttcatctgtatgaaatcataactgagcattttcaattaactgtgtggaatgaaccacgtatgaagaatcagaaatcatattaataggcatatcaaaagcagtcaatacctcaattacacctacaagctccgctttctgagctgaagtatagggcgtctggaaaactttacctttcaagccagaataagaagctgtactattactagacccatctgtaaaacaatgaaaatgcttagcaggctacagtatgtaaatgcaaaccgttcacagtcttgctcagctaaggggatagtaaagaaacagtcttttaaatctatgactattaaaggccagttttaagtcctctgaagcctccagtttctctttactcagcggccactgttctaaacattttaaaggtataggttctggaagcttaacaatggctgccatcaaaaatgatattctaatctttggcgggaactttgtctttccgcttgaagcggttctttcaaaccttgcaaatttttttctagtctcatgctagggacatgccccatttcatgcatcatatgttgattttgaaggatatataattgttctggagttagaacttgtgctccccattgttgtaataaatctttcccccacaaagttatagatacagaagttataattggttgaatagtcccaagttgtccatctggcccttcaaaatgcaaaatatagctactttgatatacttcaggggctttaccaactccaactatgttaaattgagtgggttgaattggccacgtggacgaccagtgctgtagagaaatgattgaaatgtccgctcctgtatctgccaagcctttaaatttctttccctgaatagttatttcacaggtggaatgtttatcagtaatttgatttacccaataagctgctttgccttgtttctttgtgcttccaaatcctcctgttcatttaatttcacttttccccattcccacatacggcacaatcaggagctgtgctgtgcgctctcctggctctgctttccagggaacagaagtagatgtaacaatttgaatttcctcattgtaatctgaatcaatgactcctgtatgtgtttgtaccccttttaaacttaaactagaccttcctaaaagtaatcctattgtccccgctaacaagggtccacagactcctgttgggaccttttacgggggttccccaggcagaaggctcacagcttttgtgcagcataaatctactgcggcactaccggctgtggcgggggacagacattgtacgggtgtgagggaatggcctgagctggaaatgccccagtttggaatggggcccaggacaggcccctcatggcatttcctgaaatcaggttcccttctttatcaaacttagagtgacactgattagcccagtgttttccttttttacatgttggacatatttcagactcagcagttttcttttttcccctatctggcagctgacttgctgattatttctacattcttttttagtatgaatagcttgtttaaattctttgagtaatttacaaggaaaaggctcaaatgtagctataatatttccctgttgatctggggggtgtattctaacagggaactgccaagcctctaaatcaccttctcttctagcttgctggattcctgcctgaatagaactgacagcagtcgctccaggcgctgctcgaacagtcactggggcaactacttttcgcccagcgtcctccagaaaagaaagaactggagggtcaggccactatttatggccagttttggggccagtttatggccagattttggggggcatgttcccaacagaatctcttgaacctgggaggcggaagttgcagtaagccaaaatagcgccactgtactccagcctgggcaacagaaccagactgtctccaaaaaaaagaaaaaagaaaaaaaaaaaaaaacccagggatgtgattatacttccctccaaagacaggagtgaggattaagtaaaatggtgggagtcatgagctgtgaacagtgcctggaatgtgatgagccttcaataaacctcagccatgtgatgatgatgattgtattagtttgctccagctgctgtaacaaaaatgctacagaccgggggggcttaaacaacaaaaatttattttctcacagtctggatgctggaagtccaagatcaaggtggcagccagtttgatgtcccatagtgcccctctccatggcttgcagaaggccaccttctcactgtgtcctcacgtgaccttttctctatgctcatccctggggtctcttcctcttcttgtaaggataccagtcttattggatcaggaccccactcttatgatctcatttaaccttactgtgtctgaagaatctatctccaaatatagtcacattggagggttaggactacatattaatttggggaacggataataattcagtcgatgattcttattctctctctctctctctctctctctctgtctctctctctctctccactgcaggactgacaggcagagaataggaatatgcagctgaaatgtgggcaactctcctgtcagctgaagaggtaataccaggaagggtgtgaaggaaatcctaggtttgggaacagaaagaagttcttgggcagagactccatatgtgatttcctccctcctggttccctggtcatttgtctgtgagatgttcccctcctgtggagagctccaggagctgcttttctcttcttttgccaactgccagcaccccatctgcccagctcatcaaattcctggaagctgcctaaacaagcagtctatatttcataaacctcttgggctccatgcaaaagaaactcactgacgtagctcaggaaaaaataaaatgaacagtttaatataaggacctatgaaatttttcagcaatccataggtgtgagtcagcatttgctttgtaacaaactgcctccccaaaattcactggcttgaaacaacagccatttatttagcttgcaatttcatgggtcatccatttgggctgggctcagctgggtagttctggtctctgccaggctcgctcctgcatctggggtcagttgacagattgcccaggggctgtctggactaggatagcctcatagctgggacaactggcctctccttcatgttgtctctcatcctccagcagggtgacccaagcttgttcacatggcagaggcaggattccaagagtaacagcagaaacttcaaggccccttaagtctcaagctcaaaatggacatgccatcacttctgccacagaaaggacttcattggccaaagttacatgactggccaaattcaagggatggggaagttgactccacctcttgctaagaagggaaaaatctgtggccatttttgcaatctacgaagaaatgtggaagtacacacagctctctctgccagcctcccccacacacacacttcacccccaccccaagcccttacaattcctttcctcctgcatgtggaatttacagttctctgtctctctctgcagatgggtgctttgtacctctctatccacgtggaaaaaaaaacccatcccatagcttccaagtctacaacatctctgttcaagggaacaacccaacgtaaccagactccctttgccctgtttctgaaacacctgaagaaaacatctgatgggttgactcggtgccatccttggtcccatcgccgtgacacgttgtgcaagcaaagcatcagaggctcatccctgtctgtgggagctcagtgctcagaaaacaggggggaggttttaccttggaaattggccagaccccaaaatatgtcttttacacatgctgctttttttttctctttttcaaaaagaaccaaaaaataaattaaaacaccaccacttctgaatggtttctcatgaagcctctcttcctgagagtgggagaggcatgtttgcaaataagatcaacctttgagctttgcactgttcaagtttaatacctctccataggaggatcctgacagatagcaggcacagggcacacaagtatggctgaaactcctctgggggatatatctcacatttgaggaaaattcggtgcttctgtgaccaacacagaaccacctaacatggcattctgcttagcaataatagtagcagaactgagtccaagtcttgtctgttgagggctctccatgtgccagccactgactatttaccttacatgattaatgtgtcatagcaggccaggcgcagtggctcacacctgtaatcccaccactttgggaggccaaggcaggtggctcacctgaggtcaggagttcaagaccagcctggccaacatagtgaaaccccatctctactaaaaatacaaaaattggccggatgtgggggcacatgcctataatcccagctaccggggaggctcaggcaggagaaccacttgaacccaggaggcagaggtttcagtgagccgagatcatggccactgtgctccagcctgggtgagggagtgacagtatctcaaaaataaaataaaataagtaagagatgttagccaggcacggtgactcacgcctgtaatcccagcattttgggaggccaaggcgggcagatcacctgaggtcaggaattcaagaccagcatggcaacatggtgaaaccctgtcccttgttatcacacgaatggggatgtggcttgtgtgctgcctaatcttgcctagaactaggtgtacctgcgttcttttgcttatggctttacccttggttaccctaattccctattctcctgcctcaagaggtgaccacagcagccctgggcctgccctcctagggcttatagtacagtgagggagacagacctgttcccagtgatgacccagagtcatcactctcctctgggaggccaggggggagtcttaatggagactggaggatccaggagggcttcctggtgagggaggggtcagctgtacta[137 bp omitted]cagtgaaaccctgtctctactaaaaatacaaaaaattagctggcgtggtggcaggagcctgtagtcccagctactcgggaggctgaggcagaagaatggcgtgaacccgggaggtggagcttgcagtgagccaagatcgttaccactgcactgcagcctgggcaacagagcgagactccgtctcaaaaaaaaaaataaataaataaaagagcagccaggtcttctggttggagttggtgtttaagaaaaataaaatttaaaaattaaaatttttttggccgggcacagtggctcacagctgtaatcctagcactttgggaggccgaggcagatggattgactgagctgagctcaggagttcaagaccagcctggccaacatggcgaaaccttgtctgctaaaaatgcaaaaaaaattagccaggcgtggtggtgcgggcctgtaatcccagctacttgggaggctgaagcatgagaatcgcttgaacccgggaggcagaggttgcagtgaaccaagattgtgccactgtacttcagcctgggcagcagagcaagactctgccaaaaataaaaaaattttaaaaattgtttaaagagcagccacgtctccatagtggtaattgtcaggcatcgcaccaaagagctttaatgcgttcttctcaaacagtcctcccacttcagcctgccaaagtgctgagatttcaggtttgagccactgtgccatgctatgcccatttttcagataaagaatcataagccccaggagacatcaataataattg[135 bp omitted]cctccacctcaagtgattcagcctcccaagtagctgggattacaggtgtgcacgactaccacccagctaatttttgtgtttttagtacagatggggtttcaccatgttggccaggctggtcttgaactcctgacctcaaaagtgtgggggaaagaaagagagatcagactgttactgtgtctatgtagaaaaaggaagacataagaaactccattttgatctgtactaagaaaaattcttctgccttgagatgctgttaatctgtaaccctagccccaaccctgtgctcgcagaaacgtgtgctgtattgactcaaggtttaatggatttagggctgtgcaggatgtgctttggtaaaaatgtgtttgcaggcagtatgcttggtaaaagtcattgccattctccagtctcaagtaaccagggacaccatacactgcggaaggcagcagggacctctgcccaagaaaacctgggtattgtccaagatttcccccactgagacagcctgagagatggcctcgtgggaagggaaagacctgaccgtcccccagcccgacacccataaaaggtctgtgctgaggaggattagtgaaagaggaaggcctctctgcagttgagataagaggagggcatctgtctgctgctcgtccctgggaatggaatatctcggtgtaaaacccgatcgtacattctatttactgagataggagaaaactgccttatggctggaggtgagacacactggcagcaatactgctctttactgcactgagatatttgtgtaaagtcaaacataaatctggcctacgtgcacatccaggcacagctcctttccttaaatttatctatgacaccgagtcctttgctcacgttttcctgctgaccctctccccaccattaccctatagtcctgccacatccccctcaccgagatagtagggatagtgatcaataaatactgagggaactcagagaccagtgccggtgcaggtcctcacttgctgagcaccggtcccctgggcccacttttcttcctctatactttgtctctgtgtcttatttcttttctcagtctctcgtctccaccttgtgagaaatactcagaggtgtggaggggcaggcccccttcaaaatgatccacccacctcagcctcccaaagtgctgggattacaggcatgagccaccatgcccagccacatataacttatttctaaataacttatttaactaacaccacatgattttatgaccccctattttatggatgagaaaaaagaggcaagagaagcgataccagttgcttaggattcccagctaccaattagtggaagcagaatttgaaccaagggagtctctggagccctcgttcccaatctccttttcttcctctccatgtctttctttctccccctgctcccaggcctcctacatcacacccttctggacaaagcttcacatctgacattttcttttttggggtggacagagtcttactctgtcaccgaggctggagggccgtggcgcaatcatggctcatggcagcctcaaactcctgggcttgagggatcctccagcctcagcctcccaagtagctgggactatgggcatgtgccaccacacctggctaattttttaattttttgtagaaatacagggggtgggggcatatctgaaaattttaaaccttccctgactgccgtgagcatttctgggtagaagccactccacgaccttactttgctggcatgagtgctggacagcaatttggcaacatcctctagaccacaaatgtgcatggcctttggcccagcaaatcagcttctgggaataaatatgacagatactgttacatacatgggaaatgccatggacatgatgacccagggaagcacagtttgcaagtacaaaagggctggaaacacccaaaaagcccatcccctgaagacagtttcaaaaatgacggtgcattcatgtaatggaatagtacacatttgtgaatgaatgaatgaggtagctcaatatatctgcctatgggaaaatcaccaagatatgttgctaagtgaaaaacagaaagatacagaataatgctaccattttattttttaatgggagagggaagaataaggaaatggattcatatttgcttaattacacaagcttcctgatgatcctttt[137 bp omitted]catggtgaaaccccatctctactaaaaacacaaaaaaattagctgggtatggtggtgcaggcctgtaattccagctacttgggaggctgaggcgcaagaatcacttaagcctgggaggcggaggctgccgtgagccgagatcacgccattgcactccagcttgggagacagagcaagactgtctcaaaacaaacaaacacacacaaaaaataagatgcccattggagatctccattcactattttatcagatgatatttcagcacttgagtgaagaaaatgtctacaactggtccaaacactcaaggaatttagactcttgacagagaaacacacagaagcaagcagatatgccccgaaccaaacttgctttttcttctaagcctgcttcttcggagcagcctctgaccctccagggccctgagaggagtccctggagccacaggagcttgggagcccagagaagtgggggaatcccagatggtgacagcatcatccagaggaggaacataacgatggccacagattcccaatttggaaataactcagcaaaacaacactgacagaaaattcagagatttccaagagactagcctccctgtttccatttagaaattcacctacatacatccagggtgagagaccccaagcatcagatgtgtcatacacaagcatcagatccaagttagagagggcacccggggacagaaacctccaagccagccaaaagccaaaggaaggattttacagaaagatacaggaatgtggggccaggcacagtggctcatgcctgcaatcctagcactttgggaggccgaggtgggaggatcgcttgcggccaggaattcaaggccagcctgagcaacatagcgagatcctatctctacaacaaatttaaaaactagctgggtgtgatcacatatgcctgtggtcccaactacccaggaggctgaggcaggagttgagcccaggaggtggaggctgcaatgagcaatgatggcgccacttcactccagcctcagtgaaatagtgagaccctgtctaaaaataataataaaaataaaaaacatataaagatgtcagagcacagggaccagagctgttagtcggcctcatggagaccctggccaggacagccacctctggggaccaggaagtctctcagtttctgtctctgagggtttggctctctgagtctctctgtcacctctcatttctctctcatctccctctgtctatgctgtgtctctatctctttcaatctctctgtctctgtctcccagcccttatctctgagtgtgtctgtttctctctcatttctctctctctctctctctctttctctctctctctttctctctctctctttctctctcccccctccctcctcccctctccctactgcaggctggtccataacccttatcttccccagacctgatggagttctggtattaatctgtttatggtctgtttccctccactagaacacggtcttcattaaaggcagagatttttgtctgtcttattttctgctgtatacccagtgcctgggatactggctggatcaataaatatatgctgaatgaagaatgaatgaatgaccattctcatgaacattattatttgatgccaactgtaaagcaacaataataataattgtcactgccactgctgctattgttggtatatcagctttttatttagtacaaactatatccccgaaattgagctaggcagtttcttgtttaagttttacagaccacgctgtgaggtaagtactgttagtatgcccttttttctttctttttgagacagagtctcactctgtcgcccaggctggagtgcagaggcccgatcttggctcactgcaacctctgcctcccgggtacaagtgattttcctgtcttagcctccccagtagctgggattacaggcatgtgccaccatgccggctaatttttgtatttttagtaaagatgggtttttg[135 bp omitted]agacaggtctggctctgccacccaagctgtagtgtagtggcgcaatggtagctcactgaagcctctaactcctgggttcacacagtcctcctgcctcagcctcccaaaatgctggaattcaggcctgagccaccgcgccctactatgcccatttttcagataaagaatctgagggccctcgaggagaaaccacttgcccaacatgagccctggtcttgtctgaccccaaagcccatgggaagtttaggctgcgtggaaggacagcctggtgggctcaggatctgtcccatcacgagttggaacctcagctctgccactcggcaaccgcgagccgttagtaagttgctgaatctctccgtgtgcctccgtttcctcacctggaatgtgggcgacctcacacaggaagccgcctcttctagtgggcaccgacggagcgagcgcgcgtctgcagcgggactgagcgccgggagagacctgcgcaggcgcaggcgcgcggggagggccagcctgggtggcccaccccgcgcctggcgggactggccgccaactcccctccgctccagtcacttgtctggagcttgaagaagtgggtattccccttcccaccccaggcactggaggagcggccccccggggattccaggacctgagctccgggagctggactcgcagcgaccgcggcagagcgagcgggcgccgggaagcgaggagacgcccgcgggaggcccagctgctcggagcaactggcatggcccgagccatggccgccgcgtggccgctgctgctggtggcgctactggtgctgtcctggccacccccaggaaccggtgagtgacccccgcgcagtccggtggcccctgtctggctcccagctccgcatccaggccgggtactcgcccccttgggttcccgaagatgacggccccgcccggcgccacccaccccccatctctgccccggggttggaaggaacacggtgcgagggtgcgagggcaggaccctcctcttggccacccggagagcggtcggagttgggtacagaaattcctcgaaattggcagcaacacgggtcgggcacaagaccctcctctgggcccctcggaaaggggatggagttgggtgaggaaatttcccaaaaaggcaagtgaatcccggaaaatcagcagatggtgacgcatgccggattaccttacccaggttcctgctcagcatacccaggccataacccagcagcgtgctggcaggctgggtctggacggaggggatggttgatgttggggaggaggacagtgggtgacacttgacaccattacccctctgacccccaatgtctgactccaggggcctggccattcattcattctttcattcttttttttttttttttgagacagtctcactccatcacccaggctggagtgcagtgtcctgctctcggctcactgcagcctcctcctcccgagttcaagcgattctcctgcttcagcctcccgagtagctcggattacagacatgtgccactatgcctggctaatatttttgtatttttagtagatacaggatttcaccatgttggccaggctggtctcaaactcctgataaatatatatattatatattattattatatattacatattatagtaatatataataaaaatatataatatatattatagtaatatataatatataataaaatatataatatatattatagtaatatataatatataataaaatatataatatatattatagtaatatataatatattataatatattatatatattattataatatataatatgtatattatatattatatatattattataatatataatatgtatattatatattatatatattattataatatataatatgtattatgtattatataattgataatatataataatatatttcttaataaatatatattaaatatattatatatttataacatatattatttatataataaataatatatattttattatacatttaaagagtaaatagataacatattttattatttatttatatgttttgtgtatatatatatatatatatatatatatatagtgcgtgtgtgcgtgtatgtgtgtgtgtgtatgagagagacaaggtcttgctttgttgcccaggctggagtgcagtggtacaatcccggctcattgcaaactcgacttcccaggctcaagcgatcctctcactgtggcttctggagtagctgggattataggtgctcacctggctaattttttttgtatttttggtagagacagggtttcgctatgctgcccaggctggttgcagccaagcacagtggctcatgcctgtaatcccaacactttgggaggctgtggtgggaggatcacttgagcttaggaattcaaaaccagcctgggcaatatggcaagaccccatctctacaaaaataattaactaaataaaaatttaaaaataaaaaagaatgcataggaccatgtttattagtgtcaataagcgctgtcacattttgaggacctactatgtgctagggcccttagcagaaagatttttatataggacctgggggattagaggtcagtctctgaccgcccaagttcaaatcccacctctgccactaaacctctgtatgacttggaggacactatactctgtgtcagtttccctgtctgtaaaatgatgttaacagtagtgcttgcctcaggggggctatttgaggattaaatgccaagatatatgtgaagcacccagaatagcccctgatctgtgtcagcaccctgtgagtgtccactgttctaagtctcattttacaaactaggaaaaagaatcagagaggttaagtaaccggcctgaagctccacagcagaaaactgaagggacccaaaactcctgggctataattgccttcctctcgtgcctcaatcccccacattcttccaaccaggacccacccagagtaataatgcagtgtttcatggatttgaagacccaagatttctccccgttttctacattggggttattctaacccctaatggcaagttgtgctataaatgacaacagtcatggtatgtgaaacctacgacactggtgcgatgaaaaagttctgggccaggtgcggtggctcatacctgtaatcccagcactttgggaggccgtagtgggaggatcacttgaggtcaggagttcaagaccagcctggccaacatggtgaaaccccatctctgctaaaaacaaaaatacaaaaaattagccaggtgtggtggtgggagcctgtcatcccagctacgcggaaagctgaggcaggagaaccgcttgaaccccagaggcagagcttgcagtgagcagagatcgcgccactgcactccccctgggcgacagagagagactccgtctcaaaaaaaaaagagaagaaaagaaaaagttctggcgctatatagtagtaacggttgcacaatatcgtgaaatgtacatagtgccactgaactgtatgctttaaatgacttaaatggtaaatttagttttttaaccacaatatttaccacaattttttaaatcagtgatgttgagattcagggaaatacggtaataatagaagaaatacggtaataaatagccaaagtgaaggagcacggccaagttgcagaccatcccagacgcccttaccctcctcgcctgccatggccccaactagtgccccagttccccctccccccacaccccacggtccaccggggatccagggccccagcgtgcaagtgcacgcccaggtgcccgggctcctggagcccctccctatctagtccaagaacgccccgggtctgacaccttctcttcggttctccgcaggggacgtcgtcgtgcaggcgcccacccaggtgcccggcttcttgggcgactccgtgacgctgccctgctacctacaggtgcccaacatggaggtgacgcatgtgtcacagctgacttgggcgcggcatggtgaatctggcagcatggccgtcttccaccaaacgcagggccccagctattcggagtccaaacggctggaattcgtggcagccagactgggcgcggagctgcggaatgcctcgctgaggatgttcgggttgcgcgtagaggatgaaggcaactacacctgcctgttcgtcacgttcccgcagggcagcaggagcgtggatatctggctccgagtgcttggtgagcagggggttttggggaggctgaatgaaaggcagagacttggtgggaggatcagggaagttggcaaagagcggggaggcctgggagggagggagattccctccacagcagatcccctggggacaaaaggagggggcagcgcaatgatgtggggtggggtggggggaggtgagtggggggaggggctgcagggcaggaagaaagcagagatctcagggagtaaggacccccaagcctgggatcagaaagccctgagggaggaggaggggtatattggaaagggagctgggaggggactgggaaggaagggaggaggcctgggtggcctcttctgggtccctcctttcctcatctgtaaaagggttggtgacaacagcatcacccttggaaagctgtcctgagtgtcatcactgcctaggaaagagtctgtctgcccccttggactgtgtacccatgagggcagaaccggggctattttgatcactgctgggccccagcactttccaccaaacaatatttattgagcacttattatgtgccattctaagagctttacctgcatattctaattgcctgtgattccatcattatcacctgttgacagacaaggaaactgaggcacagacttgcccaagaccaaagctgcagccttagggcagcggcgcttcaccgctggcccatgtgagccccttagagctgtcggttactgttactttatctggtgaagaaggagaaagttgaaacagacagacaggaaagcaaggatcctgatacccaaaagaggaggggatcatgctttcattttcatgagctccatgaagccttcctcttggaacttgagcaagaagtctctgtgcctcagtttcctcatctgtgggatagggatcaccatgaggattcaaaaaaactgaccctttttttttttttgagatagtttagttctgtcgcccaggctggagtgcagtggtgtgatcatagtaggtcctcactgcagcctggaactcctgggctcaagggatgttcctaccctccctgtagctggaattacaggaatgtgccaccatgcccaacttgttttctgttttgttttgttttgttttgttttcttttctttttaagcttatgtgccaagaactattccaagcctgtgcatgagaaactcatgaaatgtcaagggcttggaactgtgcctagcacacaacacccaaccaaaggcagctgttgtcactccagcaagcctgggattctgggtatcatggtttaggatgagggtaaaacagaaacagtgagtcaagttaaggagaaatcttcggtaaataatataggtaatgatggggaaggaagttccaggtttgggaatcaccaggatgatgattaagagatggtcaaggtggttttggagtcagacagactttatgtgaaagcccagctctgctgcttacagctgtgtgaccatgggcaagtcacttcccttctcaacttcagggctcaggcttcctctcctccactgagccccagaccaggataaccccctttgggtttcccctttccagccctgccctctccgagtcatcactgcctaggaaagagtccgtctgcccccttggactgtgtacccatgagggcagaaccagggctattttggtcactgctgggctccagcactttccaccaaacaatatttattgagcgcttattatataccattctaagagctttacctgcatattctcattgcctgtgatcccatcactatcccctgtcaacagacaaggaaactgaggcacagacttgcccaagaccacacagctgctcagggacacagctgggatttaaaccatgccattctgtatcttttttttttttttttttttgagacagaatctcactctgtcgcccaggctggagagcagtgacacaatctcagctcactgcaacctccgcctcccgagttcaagcaattctctggtctcagcctcccaagtaactgggattactggcgtgtgccaccataccctggctaatttttaatagagacagtttctccatgttggccaggctggtctcgaactcctgaccccaagtgatccacccacctcagccccccaaagttctgggattataggcgtgagccaccccgcccagcaaccatgccatcctgtacccttaatgaatgcccccttctgccacggaggggttcattgaatgacttgttgcttttgttcctcttcccagccaagccccagaacacagctgaggttcagaaggtccagctcactggagagccagtgcccatggcccgctgcgtctccacagggggtcgcccgccagcccaaatcacctggcactcagacctgggcgggatgcccaatacgagccaggtgccagggttcctgtctggcacagtcactgtcaccagcctctggatattggtgccctcaagccaggtggacggcaagaatgtgacctgcaaggtggagcacgagagctttgagaagcctcagctgctgactgtgaacctcaccgtgtactgtgagtgtgcccaagtcagcgatggcaagaacccctgccgggctgcccccaccactgtctacactgactccccaaggcactgtaggcattgcttccatcatctgcaccggctcccctgactcctgtctacacgacccacccccattgtctgcaccagctcccctgggccgtaaacaacactgtccctattgtctacaccagtttacttgggccatagtcaatgctggtacccagactgtctgccctggctcctctagcggctgtctgcacggatacctgacactctgttgactcccttgagcacagtctacactgcccctaaactgcctacacccatttccccaggcaagtatccacaatgaccctccccacattgctacactggttcttctggccacgatcaacactgcctcccttattgtctacacccactcccttgtccttttctttctttcctttttttttttttttttttgaaatagagtctcactctgttacccaggctgcagtacagtggcatgttctcggctcactgtaacctctgcctcccaaattcaggtggttctcctacctcagcctcccaaatagctgggattaaaggtgcacaccaccacacctggctaatttttgtatttttagtagagacagggtttcatcatgttggccaggctggtttcgaactcctgacctcaggtgatcggcctgcctcagcctcccaaagtatgctggaattataggcatgagccactgtgcccggctttttgttttgttttgtttttcctttggacagggtctcgctctgtcacccaggctggagtgtaggggcatgatcatggttcctacagcctcacccttccaggctcaagcaatccttctccctcagcctcccaagtaactgggactacaggtgcagccaccatgcccggctaattttacagtttttttctagagagagttttgctgtgttgcccaggctggtctcaaactcctaggcttaagtgatcctcccgcctcagtctcccgaagtgctgagattacaggcgtgagccactgcacctggccccttgtccattttctacactgccttaccattgtctacactggctctcctgggccacagacagcactaaccccattgtctacaccacctattttggccaccagctgtggggtgttttcactgtctcccatagtgtctacactggctcctatgaccactgtctatgtaaacaccccactttttctacactggttctcctaggcactctctaaagtgccccctgacactgtctacactgactccctggagaactgtctgcattcacctcccacattgtatcgaccagttcccctgagccacgatcaactgtctccgccgggtgctagttgcattgatcttctcacattgtttgtgctggctcccctaagcagtgtctgcagagtcccccagtgtagtctccatgttcctctgcccaatattgtctacactggctcatctacaggctatccagtctcaccccacatcaccacactggcctccttgtgttctgtctgcacagccccctgacagcatctgtcctgattctcctgcacagcgttacctccaccagctccctcatggcatcatcgacattgacacccacacatttatctccactgacagccccaggactctctaaccagtgctgtctaacagaaatagcatgcaagctgcatataggatttta[144 bp omitted]gaaactctgtcttcactaaaaaatacaaaaattagccaggcacggtggcgggtgcctgtaatcccagctactcgggagactgaggcaggagaatcacttgaacctgggaggcggagattgcaatgagcgagattacgccattgcactccagcctgggcagcagagcaaaactccatctcaaaaacaagaaaagaaagagatgaaatttatttgtttatttatttatctatttatttatttgagacggggtcttactctgtcacccagactggagtgcagtggcacagctccctgcagcctcaacctcctgggcttaagtgatcctcccacctcagcctcagtctcctgagtagctgggactacaggcgtgtgacaccatgcctagctaatttttgtttttgtttttgtttttgtttttttgttttgtgatgaagtcttgctctgtcacccaggctagagtgcagtggcacgatctcaactcactgcagcctccgcctctcgggttcaagtgattctcctgcctcagcctcccgagtagctgggattacaagccctggccacagtgcccagctaatttttgtatttgtggtagagacgggatttcaccatgttggccaggctggtctcaaactcctgacctcgtgatccacccaccttggcctcccaaattgctgggattacagacgtgagccaccgcacccggcctatttttattttttctggagacaggatctccctatgttgcccaggctggtctcaaactcctgggctcaagtgatcctcctgcctcaacctcccaaggtactgggattacaggcatgagccactgtgcctggccaaaattaatttttaataattgcctttacttaacccaatatacctaaaatattatttcaacttgtaattgtttttttaaaattattcttgagatctttcccatttattttgtcctagtaaagcctttgaaatctggtgtgtatttcggcctggctatatttcgagtgctcagtagtcacatgtggccagtaggtgccatattggacagcacagatctagactaagctcccacatcatctacactggctcatccaaatactgtctacacacatacacagagcctgtcttaatttcgtcagctcccggggacacactgtatatgtgggggtgatctcacccccaccaccacattttcaacactggcccgacaatatagcatctgctgtaatattccaacaccctgtctacactgaacccatcagtaatatccacacaagctcttctagacatcattcatactgttcctcccaccattgtctatactgcttactccccgccaggcaattggtacacagattccctcaggtactgtctatactggagtccctcaacactgtcactgggtctgagcgaggaggagatctacactgactcctacccctcgcccccgaataaaaccctgtcccattggcctgcccccaaggacattgaaaggtcttcgctgtcaatcacgtatgggatggctgagcagcagcctagagcagggttatctgggactctttcctgcaggacttgtcagaaccttgaatacactgctgtgtgttgtgagtggtcattgcctatgagtgagaaaaggaggaggcattttcctgcaggacacccaagacatgcctggtccaggctacccaggaaagctagtggagaaaagcagctcctcagaagccttctccatgtccccactgaccaaggactcctaggcttctgctctctgtggcaccccatctacctagactcctcctaggcctctccagctcccgctgttttccaaatatccccgggccttttcctgcagtgtcgtgaatcccgcgtagccccaggccccccaaagcctcccagtctctgaacctctgtatccatttcctgcagaccccccagaggtatccatctctggctatgataacaactggtaccttggccagaatgaggccaccctgacctgcgatgctcgcagcaacccagagcccacaggctataattggagcacgtgagtcctgggtctcagggaggaggggctgggggtctggatttctagcactgagggaggaggggctgggggcctggactcctgggactgagggagaaggggctgggggcccggacccctgggtctgagggacgagaggctgggagcccggactcctgggtctgagggaagaggggctgggggtctggacccctgggactgagagaggaggggctgggcctggacccctgggtctgagggaggaggggctggggggtctggacccctgggtctgagggaggagaagctgggagcctggacccctgggtctgaggcaggacagactggggcctggactcctggtctaagagaggagggagattcagaaaagagaaaaagaggaggttgacttcgggcccccagtggggggcatctctgttttgacatctctgttttgcggttgaggcgtttagcaggtggttgaatcctggctggtggatgcacctgctttttggggtgtgcctgctctgtgcccggtacttcccccgaatcccatgtgaccccatgctgtgcacagtcagcagctgttgccctgcccaggttaaagaccagccacgagagggcagaagcggcccttgaatcagcgctcggctccaaagctggtcctccgcctcttggccaagcttgtctaacctgcaggccacatcatttgtaaactttcttaaaacattatgagactttttttttgcgaatttttttagctcattagctattgttagtgttagtgtattttatgtatggcccaggacagttcttcttcttccaatgtggcccggggaagccaaaagattggacacccccactctagactgtaaccacctcaccgtcaccttgtgtaacctacttggttatctctggatggagcaagtactatatatccccattgtctagatgagaaagttgaggctcacagcaataagatttccccagattcacactgaggctgagatcaagagcaaggtaagaaaaaggcaaagagataatacataattttataatacataattttacataaattacataattttactgaaccgccctttttttttaaagaaggggctctgttgccgaggctggagtgcagtggcgtgatcatagctcactgcagcctggacctccctgggctcaggtgatcctcccacctcagcctcctgagtagctgggactacaggcacacgccaccacactcagctaattttgttgtattttttttgcagagacagggttttgccacattgcccaggctggtctgcaactcctgggctcaagcaatcaacccacctcagcctcctaaagtgctgggattacaggcgtgagccacctcgcccagccttaggtctttttccttattacaaaaataacttgtgtccactgtagaaatatcaaacaatttagttatgagcaaaaagaagaaagtagtgcctatagttcaagtgtacccagccacctccagaaatacccagtgaccccttattatacatcctgtcttttttctctctgtttctaaacaaagactggaattatgctgtacatataattttgaaccttttcgtctgtcttgtgaatacctttccatgtcaaagcacatagatccacaactccattttcccccacgttgtattaggaagactgtcaaacatacagaaaaatcataggaattttccagtgaacacttaagattccaccacgtggattcccctgctaacattttactgtgcttgctttatcacgtttctgtgattccttcagtccctctattcatccatcaatcatattatgcatttcagagcacccccagctctcctgcttttttttttttttttttttttttgaggcagggcctcactctgttgctcaggctgtagtgccgtggcacaatcacagctcactgcagccttgaattcctgggctcaagcgatcctccagcttcagcctcccagatagctgggactacaggcacacaccaccacgcctggctaacctggccccttttttagtgttgctgggattccaccactttaaaaaaaaaattcaaagaatagagacaggatctcactatgttgcccaggctggtcttgaactcctgtactcaagcagtcatctcacctgggcctcccaaagggcagggaagggattccaacatatgtggatgtcatcagttatttaaccagtccctagtagaggacacagatgtcattttccattttcaactctgcaaatgccatggtggtgtccatccccactggtcacttgtcagcagttgtccgtggaaggaattgccggtcaaaggttttcaactggtgtgatggtgcctttactgtcctgcctcaaagcaccgcaattcaggctcttgagccagatagctgcgtttgcatcccagctctgcggagcacccaaagcctgatgcttccatctcctccacctctgttcattaaaccagtgttccttgactacttactgtgtgccgggtgcaattaaccaacatacgttggtcgataaaacagaccaaatttcctccccatatagagcttccattctagtggtgaaagaaacaagaagcaagataaagtgtgtagtgtgtgtgcaatggtgataaataccatggagaagacaaagcagagaagggaatgggactgggcgccatgactcatacctgtaatcccagcactttgggaggcagagatgggaggatcacttgaggctaggagttcaagaccagcctggccaacatggcgaaaccccatctctaccaaaaaagatacaaaaattggccgggtgtggtggcatgcacctgtagtcccagctactcaggaggctgaggtgggaagattccatgcacccaggaggtggaggttgcagtgagtcaagatggtgccactgcactccagcctgggtgacagagtgagacgctgtctcaaaaaaataataattaaataaattaaagagaaggggatgggaagggtgatcatcacagttgaaatagggtggccaagtgaggtgttactaaggtgacatcccagcagaggcctgaaggagatgagggtgagctctgcgggtgcctagggggaaagcattccagcagagggaacagcatgggcaaacccatttctatccatcagtccctgcataagcaaacaccctggacacctaactggagagtttgaggaccaacaaagaggccactgtggatgcagaggcgggagcaaaggggagagtaatggaaaacgtgggcagaggtagcaggggccagatcacgtggggcctgtgacaccagaagacttcggtttaactctgagccaggctaggcccccagagggtactgagctgaggtatgggaactgacttagggttcacaggcgacctctggtggccatgtggggaacagacgagggggcgagggcagaaacggagcccagcgtggaggcggctgctgggggccgggatgcacagcgccagagcagggaggtaccgtggaagccctgaggagaggtgggattctggatggatcttaaggcggggccgacatgattggctaatgggttgggtgtgggcatgagaggaagggaagagttggggggcctccagagttgctctccgcttatgctatagagggcgtgagggtttctgggcacgtagtgcgtgctcaatcactgtcactccggacctgcagcagaggccacctcctcacctttctgtctctcccaggaccatgggtcccctgccaccctttgctgtggcccagggcgcccagctcctgatccgtcctgtggacaaaccaatcaacacaactttaatctgcaacgtcaccaatgccctaggagctcgccaggcagaactgaccgtccaggtcaaaggtgaggaactccctgggtgggaagaacagggaccaaaggaagaggtcgaggcagggttccctgtctaatgctctctggctcccatccttctcctaagccttctcacaaaaggaccagtggggccagctttactcccctgttaactccatacctatatcactggtaccgttgttcagctgcctggatacactccctccacacacacaggttgggatagatgtggaatccctctctctcagggactcaggcctttccaaatatattaggcagacctctatcaattgcaattgacagaaacacaaagtagtctaagcaaaaaaaaccaaacaaaacaggactttattgaaaattcaccttcaggtatggttagatccaggggctccaaccttgtaacccaggaacttttattttatacatctcttgtctctgcttttcgttatactggctttattctcaggcaggctctgaagcaagatggccctcggcagggacaggctcacattctaccagaatggcaacagcaggagaaaaaacataccactttcagtaactgtagccatagtcccagggctggctctcattggcccagcttaggccacagcccacctatgaaccaatcatagcagccagggagaatggaatattctgattggccaggcctgtgtcaaagtcccattctgggcaccagagggtgggatccattccacctgaattaaatagactgaggcagtggagtggtggctccctaaggaaattcaagatgccatttcaagaatgagggataaaccccaagagtttccttacctaaatacctgtttccttctctttcagagggacctcccagtgagcactcaggcatgtcccgtaacgccatcatcttcctggttctgggaatcctggtttttctgatcctgctggggatcgggatttatttctattggtccaaatgttcccgtgaggtcctttggcactgtcatctgtgtccctcgagtgagcatcaccagagctgccgtaattgagcacctactacgggctctgtgctgagtccttccagtgtgcctctcactgaatcctcaccccactgccatgaggtttcccccatttgactgatgagggtgcagagccagggagccttgttcactggttcattgattacatttacaaatattatttacagagtgggagaagagcgtatagggtcttaatgccatggtagggactttggaatttaattcaggtgatgtgggagtccctgccagatggatggagggtgaaataatgcttaagccctcagccttactccatctgccttgttcaggagtgactcctaggaggaggtggcaggaactggcacctctgatcctcagctctaaaagggtctgatgctttcacacctcaagagatttgcacaggccgttcccctgcctggagcaccctcccatggctccttctggagaagtgtgccagctcattctgtaatcagaggaacgatgctttgctgagcactgtctacatgccactttgtatgtataaccccctcgattttaatttttaattttttttattatttatgtatttatttatttatttttgagacaggctctcactgtcgcccaggctggagtgcagtggtgcgatctcggctcactgtagccttcacctcccaggttcaagcgattctcatgcctcagcctcccaaggagcggggattacaggcacgcactactatgcccagcaatttttgtatttttaggagagacagcgtttcgccatgttggccaggctggtctcaaacccctggtctcctgtgatccacccgcctcagcctcccaaagtgctgggattacaggcatgagccaccacacctggcctgtacaatctccttgaatgcccacaaccacccagcaaagtggttctcccgtgagccccatgttacagaggaggaagtatttgctttgagagatgaagttacctgccaatggtcaaacagctggacatggttgttggggagaagaagccagatctttgactaccaagcttttccttcaaccactaaacaaagctgctcccttacaacccaggcggatactgcctcgtccaggaagccctccctgacccccaagcatgagccaagcatccactaggctctcccactccagccttgcccattctgggtcatcaccgtgggggacttgtttgtcatccccagtggactgtgagccccaagatagcagacctgaggctgtcactgtcatgactgtgtccccaggaccgcctaccactgggccgggcataaaagaggcactcgaggaagtgtttgctgagtgattcaatgtgtcagctccagagccagactgcctgtatctgggccctaaagctactgcttgattagtgatgtcaccataggcaaatagcttaagctgtatgactcagtttcctcatctgtaaaatggggtgatggtacctaataatacagtagagcacttaacacagtaggtggcacatggtaagccacatactgagtatgtatttgctatgattgttattgctattattactattattgttattattaacataaactgcacaagagcaggctttttgtttgtttgtttgtgttttgttttgagacaagatcttgctctgttgcccagactggagtagtgcagtgatgtgatcttggctcactgcagcctcaacctcccaggctcaggtgattctcccacctcagcctctcgagtagctgggattataggcgtgcactcccacgcctggctaattttttatatttttagtagagatggagtttcgttgtgttgcccaagctggtctcaaactcctagactccagcaatccgcccacctcagcctcccagagtgctggaattataggtgtgagccaccacgcctggccaagagcaggcatttttatctgttttgttcacagctgtgtccccagcacctagaatgtacctggcacaaagtagacattcaccatttgctgaataatactactatttgctaaataaacccctgttgaatagtctaggaaactgaacacagagaggttaagtcacttgtccaagttcacacagctcctaaaggacagagatggaatttgaacccatccatctggttccagagccaggctcgatatttatggatatttcataaccaagtgaataactggatggctaaatccttagaaagcacaccctccatccctgtctgacacacgtgtataccattaagggaaatggcacccccatgtaatagcagaggcagaacttgacattttcagggccctgacacccaggcatgtcttcttcccatgcttcccagcattattccttcctgacgacttcccctcctatttccccaggtacagagcatgccagcgcctcagctaatggggtaagtgcagtgttggagctaaggagggtgtggggtctgcacgaactacagaccagacgtcttcagatgcccacggcccggcctcaggagcctgggtcttttctcctggtgcctcgagcagcatttcccaacccttcctgctgggcggaatcccctgtagagtttgctaagacgcagccccagacagtctggtctgtgatggggccagggaatctgcattttaatatccgctctctcccccctgccccacgccccttcaattccacccatggccacaccttgagaagcactgccctggcttccagggagagaggaggggacgggcctgcagttctttgcacatggggcttcagtgggaagatgtttgattttgttcaaaagagccccaaggctaaaatttgaaaaccctcttctagcatgtctcctattcagctgtgagcagagagaacagctcttcccaggatccacagacagagggcacaaggtgacagcgtcgggactgagaggggagagagactggagctggcaaggacgtgggcctccagagttggacccgaccccaatggatgaagaccccctccaaagagaccagcctccctccctgtgccagacctcaaaacgacgggggcaggtgcaagttcataggtctccaagaccaccctcctttcatttgctagaaggactcactagactcaggaaagctgttaggctcacagttacagtttattacagtaaaaggacagagattaagatcagcaaagggaggaggtgcacagcacacgttccacgacagatgaggcgacggcttccatctgccctctcccagtggagccatataggcagcacctgattctcacagcaacatgtgacaacatgcaagaagtactgccaatactgccaaccagagcagctcactcgagatctttgtgtccagagttttttgtttgtcttgagacagggtctggctctgttggcagactagagtacagtggtgagatcacagttcattgcagccttgacttctcaacgccaagtcatcctcccacctcagcctcctgagtagctatgactacaggtatgtgccaccacgtctggctaatctttttattatttgtaaagtcgaggtttccctgtgttgcccaggctggtcttgaactcttggctccaagtgatacttctgccttggcctcccaaagtgctgaattaagcagctcaccatccacacggctgacctcatacatcaagccaataccgtgtggcccaagacccccaccataaatcacatcattagcatgaaccacccagagtggcccaagactccaagatcagctaccaggcaggatattccaagggcttagagatgaatgcccaggagctgaggataaagggcccgatctttctttgggcaaggttaagcctttactgcatagcagaccacacagaagggtgtgggccaccagagaattttggtaaaaatttggcctctggccttgagcttctaaatctctgtatccgtcagatctctgtggttacaagaaacagccactgaccctggtcaccagaggctgcaattcaggccgcaagcagctgcctggggggtgtccaaggagcagagaaaactactagatgtgaacttgaagaaggttgtcagctgcagccactttctgccagcatctgcagccactttctgccagcatctgcagccagcaagctgggactggcaggaaataacccacaaaagaagcaaatgcaatttccaacacaagggggaagggatgcagggggaggcagcgctgcagttgctcaggacacgctcctataggaccaagatggatgcgacccaagacccaggaggcccagctgctcagtgcaactgacaagttaaaaaggtctatgatcttgagggcagacagcagaattcctcttataaagaaaactgtttgggaaaatacgttgagggagagaagaccttgggccaagatgctaaatgggaatgcaaagcttgagctgctctgcaagagaaaataagcaggacagaggatttgctctggacagagatggaagagccgggaacagagaagtgtggggaagagataggaaccagcaggatggcaggggcaaagggctcaagggtgaggaggccagtgggaccccacagagttggggagataaaggaacattggttgctttggtggcacgtaagctccttgtctgtctccagcacccagaatctcattaaagcttatttattgtacctccagcggctgtgtgcaatggggtcttttgtggaaatcaaggagcagacaggtttcatgtgtactgtcaccacgtgggatggaaccagaggcatggaagcaagacgctaaatgaagagggccataagggctgggattcccaggcaccttaggaacagcttgtctttttttttttcctctccaaaaaaaatgtttaagggacggtgtctcctgtcacccaggctggagtgcaatggcacgatcatagctcattgcagcctctaactccggggctcaagcaatcctcccacctcagcctaccaagtagctgtgaccacagctgcccctcaccatgctaagctaatttttttaattagatagtacataaacgtcccaaaattagaagataaaaagacatgagggatccattctaatttgtgtttggagtgtaatggtccagctccattcttctgcacatggatatccagttttacacaacactgtgaatgtaatgaatgccactgaatcatacactcaaaaatagctaaaatggcaaattgtctgttatctctttttaaccaccatttttgaaaattaattataccaaaaaaccattgaatagtgcactttatttatttatttatttgtttatttatttatttattttagaaataagagtctcactttgttgcccaggctggagtgcagtggcgtgatcatggctcattgcagcctcgacctgctgggctcgggctatccttccatctcagcctcccgagtagctgggactataggtgggcgccaccccacctggctaaatctctttttaacttttgtagagataggcatctcgctatgttgcctaggctgggctggaactcctgggctcaagtgctcctcctgccttggcctcccaaagcgctaggattacagatgtgagccaccgcgcccaccctgaaccttactttttttgctcagtttctggtaattcagagaatgcctcctgagttgttctacacccacctcatattccatgggagggctgtacagggcttttttaacgaggcctctaaggacaggcatttgtatcctttccagcctttcactattacaatgttgtagtgaataactttacacactgtcatttattttacttttttttttttttattttagagaaaggaatcttgccatcttgcccaggctggtctcaaattcctgggcccaaacaatcctcccgccttggcctcctaaagtactgggatttataggcataagccaccgtgcctggccaatgcacactgtcatttagctcatgttaacacctgagtgtaggacacactcctggaggtggaattgctgggccaaagagtatgtttcttgtcattgtgatagatattgacaaatgaaccctcacagaagttgtgctgagttctgttcccaccagcgacgtaggcgatgacctttttctggagggagggggcatccttggagtccacagagccaggaatggagagtgggcccagaattttggtataggtgttgtataaacttatagtaaggttaagaaaaccgcaactatccttatcagagacttggcggggggcagggtatgatggagatcataaggaggctaaaacactccacaccctccctctgcattgctcctgcacgggagtcgggaatcttttcaggttgatacgatctcaccttgaggagctgtgaggtcccagaagcctctgggttgcagattgcttggggtgaaaatg[136 bp omitted]aaaccgtgtctctacaaaaaaaattagccaggtgtggtggtgcatgcttgtaatcccagctactcagaaggctgaggtgggagaatcccttgaacccgggaagtggaggctggagtaaaccatgatcgagttactgcactccagcctgggtgacaagagtgagactctgtctccaaaaaaaaaaaaaaaaaaaaaaaaactggattgcctggctctactccgggcacagcatgcaggcccagttctgctgctctgctgtttgttctgctttcctccacatattggcatcaccctctggtgccaagatggctgctgcattccaggcatcacatccagactcagacccagagaagctgcccatccctacctgggtgagcctttgtaggaacgagaaaccgcatccagcagcagaaacctcacccagcagcgtcttttccggtctcattcaccagcgccgcccaccgctcaaccaatccctggccaaaagaatgggaccgcctggaaggctggaccaaacaggacctgccctctggggctggggagaggcccagatgaaggctgcaggacaggatggactcctagacctctgttaccagcagtgactacctctgtctgggtggttggaacatgtttgaattttattctaagtactgtctacaagttctgcaataaaccttgactcttcttttaataatgcaaaaggaatcgaagtgattgtttgaaagggagaggaagaaagagagagggagggagggaagaatggagggaggcagggaaggagacagagagagtagaatccagccaccggaaaatccagaatagctggctttgcttaatccatgcctggaaataactgctgggtttgcaacaacttctctcccggagacagaccaaggaaactacaaaactgcaggaaggattgaagggccgggcacagtggctcacgcctgtaatcccaacactttgggaggccgaggtggattggatcacctgagatcaggagttcgagaccagcctggccaacatggtgaaacctcgtctctgctagaaatacaaaaataagccgggcgtggtggcgtgcgcctatagtcccagctactcgggaggctgaggcaagagaatcgcttgaacctgggaggtggaggttgcagtgagctgagatcgtgccactgcactccagcttgggcgacagagtgagaatctgtcaggtggattctgagggtactctgaccccacgaacccagcatgaaatcttccaggcattaaggaacattgaggatgtggaggattggaaatccctccagggaaaatacacttctcttgagcagggtcacgaggggtgggggcaatgtgggaggtggggcaaatccaaagacaaggtcaacagcaataataataataacaatgacaggcatttgttgcttgttggctgggcctcttgcatacagttctcccaacatccctgtgaggtggtgatgcttatccccattctccaggggaggaggctgaggcccagagaggtgaagtcgtgtgccacaaaataccccagccatatggtggtagaaccaagttttcagccagactcaccagctcacagcagagctgccctggactctacagccattcagtgtatagctgggccactccatcattcaaggcagttcaacgtcaagattcctgatttgcctcaacctggggcctctagaagataccatcacccccaacaagctgaagacgtgtgtccggaacactcagacacacacaaagtgctatggatacaccacaccccgacctagctgtctcttcctgatggacctcactgggtagaaatgcctggcaccgcctgcctcagatccctaggtcagctctcactccccaatagaagtttctgagatgatgatgaaaacgttctccatctgtgctgtccaatggagtagccactgatcacttgaggctagtgagcacttgaaggtggctagtttgaggaactgcattttttaatgcatttaattttagttactttgaatatatatacacatatatacatttatatatacatattcatacacatacattttacatatattttatatgtatatgtaatatatatataaattatatatgtatatatttttatatataaatatatattatatatttataaatatataaatatataatatatattatatagatatataaatataaatatatattatatatataaatatataatatatattatataaatatatataaattatatatttatatatataatatataaattatataaattatatatatttatatataatatataaatatatataaattatataatttatatattatatataaattatatattttatatataatatatacaatatatataaattatatataatatataaatatatataaattatatataatatataaaatatatataaattatatataatatataaaatatatataaattatataaatctatataaatatatactatattataaatatagtatatatttatatagatttatattatttatatagtatatattatatatttatatgtttatgtatatataaatatataatatataaatatatttatatattatatatttatataatattttatataatatgttatatatttttatataatatattatatatatttatatgctatattatatagtatattatatataatatattttatatattatatatatatttatataatatttatatattatatttatataatatgtttatatattattatatttatataatatgtttatatattattatatttatataatatgtttatatattattatatttatataatatgtttataatatatataatatatttatataatatgtttatatattatatatataatatatttatataatatgtttatatattatatatataatatatttatatattattatatatattttataatatataatatatataatataatatatatattatatatattatatatattatatattagttataatataaatatataatatatgtatataattatataattatatacatattatatatgtatataattatataattatatacacatattatatatgtatataattatataattatatacacatattatatatgtatataattatataattatatacatatattatatattataatatattatatattatattatatattataatatgtatatataaatataatatataatataatataatataatatatataatataatatataattatatataatatatattatatataaaataatatatatatattcagtttttttttttggagatggagtcttgctctgttgcccaggccggagtgcagtggcacaatcttggctcactataacctccacctcccaggttcaagtgattctcctgcctcagcctcccgagtagctgggattacaggcatgcgccaccacggccagctaatgtttgcatttttagtagagacagggtttcatcatgttgcccgggctggtcttgaactcctgacctcaagtgatctgcctgcctctgcctcccaaagtgctaggactacaggcatgagccaccacgcctggcctattcagtatatttttttgagacatggtctcactctgtcacccaggctggagtgcagtgtcatgatcaaagttcactgcagccttgacctcccaggttcaacaatcctcctgcctcagccttctgagtaactggaactatagttgaaagccaccaagcctacctaattttttaaatttgttttgtgtaaagttggggtcctactatgttgcccagcctggtctccaattcctaggctcaagcaatcttcccacctcagcctctcagaggggtaggattacaagtgtgggtcacctgtgcctccctaaatttatatttaaatagccacatatgactaatagctatgatattaaacagcataacactagaccctccattatccaagctctgttgatccaaccaacagagcacatttgatctctcctacctcccagcctcacacacacaggccccacaccctccttcctggctccactcacccaagatattgcaacctcctcaatacaccttgatgactatctcagcctccacatccttgcattgctatttatgctgcctggtgcacctcatgctgcctcaccccatcatctgcctcatttctactcttactccaggtctcagctcagatgccccctcccccaggaagccctccctagccgtcaggttgaatgaggtgtgtctccttgggctctcccagactcctgggctcctccatcccagccctgatcactctggatcataattgtgtgagaggggtctgcccccccaaaccctacaggattgtgtgccctactgtggacagagggcagagcagaggtggtctcaatcatcactgtgtcaccaacatcacccagcacacacaactgggcactgggaatgtgtgctggaatgaatggaggatgctttttaaaaactaggctaagccaggtatggtgagtcacatctgtaatcccagtactttgggaggctaaggtgggaggatcacttgagcccaggagttcaacaccagcctggggcaacatagtgagatcccatctctacaaaacatataaaaattgaccagggatggtagcacacaactgtggtcccagctactcaggaggctgagacgggaggattgcttgagcccaggagttggaggctgcagtgagcaatgatcatgcaactatactccagcctgggcaacagagcgagaccctgtcttaaaaaaaaaaaaaaagaataacacacttggaataaacatgatccaaaaaagtacaaaacatacactctggggctgggtgcagtggctcatgcctatactcctagtactttgggaggccgaggcaggaggatcatctgaggtcaggagtttgagaccagcctggccaacatggcaaaaccccatctctactaaaaatacaaaaattagccaggcatggtgacgcatgcctgtaatcccagctactcagaaggctgaggcagaagaatcacttgaacctgggaggcggaggttgcagtaaactgagattgtgccactgtactccagcctgggtgacacagcatctaaaaaagaaaccaatccaaaaactacaaaatattcttgcaattataggtgacatatttaaatggtaagacaaccaatgttcatgaatggaaagacagagcaagaccctgtctcaagaaaaaaaaaaaaaaaaaaaaaaaaaaaaaacaggctgagcgcggtggctcacacctgtaatcccagcactttgggaggccaaggtgggcagatcacctgaggtcaggagttcaagaccagcctgaccaacatggagaaaccctgtctctactaaaactacaaaagtagccgggcgtggtggcgcatgcctgcatttccagctactccctgaggtgggaggatcgcttgaacccaggtggcagaggttgcggtgaactgagattgcgccattgcactccagcctgggcaacaagagcgaaactccatctcaaaagaaaaaaaaagaaaaacacgaggctaagagcttttttttttttttgagacgaagtctcgctctgtcacccaggctggaatgcagtggcgcgatctcggctccctgcaacccctgcctcccaagttcaagtgattctcctgcctcagcctctccagttgctgggattacaggtgcccaccaccacgcctgactaacttttgtatttttagtagagacagggtttcaccatgttggccagg[131 bp omitted]tctgtctattggcagacttgcctcttttcctgggcctctgtttccacatctgtgcaatgggaacagttatttatggtggctgctgaatgaggcagtgtgtgtttgaacaaacccaggggaattgttcaaacagaggctgttatgactattgctacagtgactgctgttgtagtcacgctgagtgagaaaaagaggttgaagagggtcaggggaggagtcctgggaagttccccagtcaccctgaaaaactggttcaacctctgtctgtgctcccatcccagggagtataggtggagcctccagagcccatggacagggcatgctggggctgggccagccccagcggtgtctctaaggcacccctgggatccccactgagctggcctacttcagacagccagggcccacccctctggcccccttagtgtccagctcgtggccccttggcatttccacaagacgccaagatggagattcccatggggacccagggctgcttctcaaagagcctcctgctctcaggtaaggaggaaatagaccctaaaggccaaggggagaaatggggactcagcccagagattgaagtttcctcttagaagtagggaaagattacctgagaggatgaaattagaataagatgggggaggggcaacagaatcacagcctcattgccattttatctatggaattttctataatgttaggaccatgaaggcaggaatttatgtatgtttggttccctgctatatctccagtgtctagaaattgaaggaagtttagatgtattacatatagttggtattatagcttatatattacatatgcctataagtattggttgaataaatgaatgaatgaatgaattcagagagtccatgtgtttagaagcaggccacacagcatctcaaggtagaaaaacctctggatcaacaggatggcaaatctgtggtaaccatgcctgtgttcccactcctgcacccagggcagacatcactaatcaatcccagcattgtttccaatgagcagcactcagagtccttgctccccgctgaagatctgtatctagagaggagcatgccatggtccctggcaacacccctgatctcagcccttccctgtaacttcccacagcctcaatcctggtcctctggatgctccaaggctcccaggcagctctctacatccagaagattccagagcagcctcaaaagaaccaggaccttctcctgtcagtccagggtgtcccagacaccttccaggacttcaactggtacctgggggaggagacgtacggaggcacgaggctatttacctacatccctgggatacaacggcctcagagggatggcagtgccatgggacagcgagacatcgtgggcttccccaatggttccatgctgctgcgccgcgcccagcctacagacagtggcacctaccaagtagccattaccatcaactctgaatggactatgaaggccaagactgaggtccaggtagctggtaagtgttagggtctggggatgaggtgaggaagctaatgagccctgagcagctaccatgcaccaggtgctgtgcaaacaccatttcatttggtcctctcatttattcacttgacacatattgagcatctactgtgtaccaatccccagagatagtctttaaccctcacatgcattaactaataaaatatctatgaaatgcccgccttgtgcctgacactggagaatgcaccatctcatttacctttcacatgcactaacattaaccaaatttttatcgagcacttactgtatgcctggttgtgaggaatgcatccctcaatctttatgtttataaagcgagtatttactgatgaatccactcggggcaaagtgtgagggaaagggtggtgggcaataatgacagctggcatttcttgggtgatcgttaagagccaggcaccatcttaaacattttccctaaagcatagtttctcagcttcagcactactgatgttttgtattggccagttcttactagtagagggtttgtgcattgcagagatttcagcagcaccccggcctctactcactaggtaccagtagcagcttcctagtcatgccaaccaaaaatgtcttcagatattaccaaatgtctccaccctgggataagaatcacccctggttgagaaccattactctatatttactcatttttaccttaaaacaactccatgaggccagcgccattattgtctccattttacagattgaaaaatggaggcacgcagtggttatgacttgctgagtaaagaatacgaaccagaatgatgtgacatgggaaaggaggtcatcagggagacctcactcaagaagtgaccttagaggagagaccagaagaaggtgattgagggagggaggtgctgtggccccttgccatttccacaggacacagatccccttagaatttatatgttgaaatcctaacctccaagatgatggtattaaaaggtggggcttgggcctggcacggtggcttacacctgtaatcccagcactttggaaggctgaagtgggtggatcacctgaggtcaggagttcgagatcaccctggccaacatggtaaaaccccgtctctgctaaaaatacaaaaattagctgggcatggtggtagatgcctgtaatgccagccacttgggaggcaggagaatcacttgaacccaggaggcagaggttgcagtgaaccgagatcatgccactgcactccagcctgggcaacagagcaagactccatctcaaaaaaaaaaaaagtggggcttgtgggaggtgattagatcatgagggtacagcacttgtaaatagattgtatgcccttatttttttttttttcaatttaaaagcaagattgtggagacagggtcttactgatattgctcaggctggtctcaaactcctggcctcaagcaatccttccaccttggcctcccagtgctgggattacaagaataagccaccatgcccagtctcagctcactgtaacctccacctcctgggctcaagcgatcctcccacctcagcttcccatgtagctgggactgtaggcgcatgccatcacacccagctaattttttttatttattggtagagactgggtttca[142 bp omitted]aaaaattttacagaaatggatgaaataggcaaaagtcaactcaacatatgcattaatttgattacacaaatctgcataaaatgacactctagtccggttggagataacagtccttacttcacttgtggagcctgaagtgacttctccccacatttccggggttcccaggtcacaggtgccccctttggaagctgcacagcatggtcattaaggagttcaggtggcctgggtatgatcccagcactgcacttattgtgagccatcaagcaagtcaatttactgttccatgcctcagtttccttatctgtaaaatggcatagagcttacttctttgttggatcattcagagaacagcgtgtgtgtgtgtgtgtgtgtgtgtgtgtgtgtgtgtgtgtatttcaaacttcataacaaccctaagaactaggtattcatattatcctcatttcacagacgaaccaagtcacagagagattgagtaatttgcccaaggccacaccgccagtgggcagcattaggatcccatagtctatgagcttagctgccaagacgggttgggatagaacagatgtccagcttgagagtaaagctgggaggtcagagggtaagagccaggtaggcgtggtcttaattctagcaagtccagtttaagaatcctccaagtcccctacatctcctgcaaaacacagcccagaacctcatccttctgctgaagggattcaggtatcatcaaccgaagtgagaaaaagcaaagcagattgggtctgggctcggtggccacgtctgtaatcccaacactttgggagaccaaggcagtagaactacttgagtccaggaatttgagaccagcctaagtaatttagtgacaccccttctttacaaaaaatttaaaaattagccaggagtggtagtgtgtgcctgtagtcccagctacttgggggactgaggtgggaggatggcttaagccgaggagttggaggctgcagtgaaccgtgatcatgccactgcattccagcctgggcaacagagtgagacgctgtttcaaaaaaagaaaaaaaaaaatcagtttgatggggtagggttggggagcatgtcagcaagcagattttggatgtgctgaggatcgtatgaaatcctagggaagcagcaacatcgagatataggacagctaaggagttccatctgggacatgttgaaattttttttttaatagagatagggtctcactatgttgcccaggctggtcttgaactcctgggctcaagtgatcctcccccatcggcctcccaaattgctgggattacaggtgtgagcaccacgcccagcccgctgggacatgttggattttatgtgccacccagatggttggatactcagatctgaaaagcaggagaaagctctgggctggaaataggaaactgcacctcagttctccatgcagtcactgatatagtcggtgagggactgggggagccctcaggagacatcgcacagtcccccctctctctttctttctctcacccctcagaaaagaataaggagctgcccagtacacacctgcccaccaacgctgggatcctggcggccaccatcattggatctcttgctgccggggcccttctcatcagctgcattgcctatctcctggtgacaaggaactggaggggccagagccacaggtacagggtccccaagtgtccctctcctgtctgctcccactgtcttctcaagccccatggattcttccacaagtcacatcatccggctcatacacaatctcatcaaatcttggaactcctggggtgaaaagaatctttctatcctgtattaaacagaattctgcattgcaagggacagaaaacctattcttaaactgacttaccaaaaagaaggaattttagtcagggtctcgctctgtcacccaggctggagtgcagtggcacaatcacgactcactgcagcctcaacttccccggactcaggtgagtctttcacctcagcctcccaggtagctgagactacaggtgtgcaccaccaagcctggctaattttttttatttttgtagagatggggttttgcccaggctggtctcgaactcctgggctcaagtgatcctccagctttggcctcccaaagtgctgagaatacaggcatgagccactgttccctgcccaaaaaacaaggaattgtttaatactacataacttattcaggtaggctgcatccaggggctcaatgttctcaaatgactcctttatatactcgtcaactctgtatttttcttcggtggcttcattctcaggcaggctctcccctgttgccacaagatcactcccagggggcccaggctcatactccactggtttagccattcctagcaaggagaccaccttgttcctggtagttccaacaagagccccaagtctacctctcattggcttaactcagatcacatgacttttcatgaaccaatcactgtggccaggggttggtggccagggaaagctctgattggccaaagttgggctatttgtgcagccccagagactgggctagatccaactccgtttaatcaagtggattgagagtgtagaccggctctccaaaggaaaacaaaactggttgctattgtcaaagaaggggagtgggcagcagcaggcacagctatcagatgctacctacttgtatggagagagagagagagagagagagaggagagagaggagagagagacagtcctgtttcccccagggagagtctattcgtgaaaaattcctttcttatgacatcagcgtcttcagaactttgtctcttgaaattgattctgaactgattgtagataagatgtctaatttttctgccactcaccagttcccagaatatgaaagcagcaattttgtctcctttctcaactcttccttatgtgccatggattctgttttcttcttcttcttttttttttttgagacagagtcttgctgcagtgtagtggcgcaatcttggctcactgcaacctccacctccgggactcaagcaattctcgtgcctcagcctcccaagtagctgagactacaggcgtgcaccacaacgcccggctaattttttgtattttagtagagatggggtttcaccatgttgccctggatggtctcaaactcctgatctcaggcaatccgccagcctcggcctcccaaagtgctggaattacaggcatgagccactgcgcctggcctatttctttttcttttttaaagagacagggtcttgctttatcacccaggctggagtgcagtggcatgatcatagtttactgcagcctcagactcctgggctcaagtgatcctcccacctcagcctcctgggtaactgggaccacaggcctgtgctaccacacctggctaattatctgtattattattttttgtagagatggggtcttgctatgttgcccaagctgacctcaaactcctggccttaagcggtccttctgcctcagcctcccaaagtgctcgaattacaggcatgcatcaccatgcctagcttattttttactttttgtaaaaataagatctccctgtgttgccctggctgtcttgaattgctgggctcaagccatcctcccatctcagccccccaagtagctgggactacaggagtgcaccatttccaagcttttttttcttcttcttcttgttttgctcttgtcgcccaggctggaatccagtggcgcgatctcggctcactgcaacttccgcctcaggggttcaagcgattttcctgcctc[134 bp omitted]tggcctcccaaagtgttgggattacaggcatgagccactgagcccaattactatttttttactcaaaaccgcacacacaccttccaccccctcccccctctccattttccttcatagggaaggatgttgctctctgatattctactgtcaatgctttattccaattttcttcccctctctttccaccctagactgcctgctccgaggggccagggatctctgtccatcttgtgctcggctgtatccccagtgccttcagtgacgcccagcacatggttggtgcttgtaaatacttatttagtgaactaacaaacttgctatagcggtgtcaagagtacttttgttttcagagtcaaagtctcactctgttgccaaggttggggtgcagtggtgcgatcgtagctcaccgtagcctcgacctccctggttcaaactatcctcccacccgagtctcccaagtagctgggaccccaggtgtgcaccaccacacctggctaatttttgtaatttttgtagagacgggatctcactttgtgagtcaggcaggtctcaaactcctggcctcaaaaaagtctcctaccttggtctcccaatgtgctgggagtatagtcatgagccatttcacttggttccagtgtacttttaaaattaagggtattcaggacgggtgcagtggctcatgcctgtaatcccagcactttgggaggccaaggcaggtggatcacttgaggtcaggagttcgagaccaacctgatgaacatggtgaaaccc[217 bp omitted]gaggcag[153 bp omitted]atcccagctacttgggaggctgaggcaggagaatcgcttgaacccaggaggcggaggttgcagtgagctgagatcacgccattgcactccagcctgggcaacagagcgagactctgtctcaaaaaattaaaaaataaaaaataaataagggtattcaaatgaatctatgtaaagagaaatattaaggaaatcataagacaggtggatgaagcaggatcatttaggtgatctctgtaaatggtgatgtctggggaacactattcattggcataaggtggtggctagggaaactgagggattgcggatgaggattatggaagaaaagtctgggatagttcaggcctcatcctagctcactctgaaggagagaccatgtggctttcagggacctggtgggatttccagcttctcttaagtctctctccccccgcctgagtgtctctctatcctaatatcaattccctctatgtgtccccaggatggcgaccacagagaagccagaattgggccctgctcatgatgctggtaaggcgggagccccagatctcactacctagccctcctctcagctcctcctttctcccctatagccacaagcccgcttattctccctcactcagagacctcccaatgcacctgccccgagacctctctggggccccctgaactcacccacataatctgagcgcatcggcacccaccccaaacctgctttttctcttcttctcagtggctagcatccccatcccatcatgcaagtggatcccatccacctccacaggccactaccagcctcctagaccccccacacccagctcctcactggtctcccagcctccagacccctccaacccatcccaggacaaggtctttctaaaattctgatcatgttactcctctgctcaaaggccctccatggctcccctgtgcccttgggacaaagtttagtctccttaacatggttctcaaggcccttcacaagacagatcaaacacagtttctgaaacacagctggctctctcaccagacctctgcactcaccctctcctgccttagcttcactcacttctctctactatctcagatgccccctcctccaggaagccctcactgagtcctaggctacttaggcaccccgtcttgggctcccacccgcccccagtcccccgactccagccctaaacactccaggttgtcactctggagactggtctgcgtcccccactggactgtaagtcctggaagggcaggcctgggactgtcgtggtcagcactgtgtccccagcactgggtttggctagaagaagcgtttgcacaaatgttagttgaataaataaataaatgaatgtcaacaggcagtcagagtggcctgtggggcccatgtgtcagctggtacctcccctggcctctgtttcaggtgacaacaacatctatgaagtgatgccctctccagtcctcctggtgtcccccatcagtgacacaaggtccataaacccagcccgggtgagtcccgtccccagcctctcccctgaagccaatgctaacaggcgcctcctctctgagctggctgtggtcctctgggccatcttgacaccaggtttgggaatctcaactctctatatattgttccctgtttttaaaaatcctaaggaaaagagactggaaggaaacagcacaacagaagcagcatttgtctccggggtgtggaggctggtgggtgggttttatcttcttttcttttatacttgtctgtgttttctgcactgagcagccactacctttataatggggaggttttatatatatataacgaaaggtttataaaaatgagtcatttaggctgggcgtggtggctcacgcctataattctagcactttgggaagcca[134 bp omitted]gaggaaggagaatcgcttgaacccaggaggtggaggttgcagtaagccgaggtcatgccactgcactccagcctgcacgacaggagcgagactccatcccaaaaaaaaaaaaagttatttagattaaataaaaagagaaacttagctgggcatgatggctctacacctgtaaatcccaacactttgggaggccaaggtgggaggattgcttgaggccgggagtttgagaccagcctggggaacatagctagaccccatctctacaaaaatttagctaggcatggtggtgtgcacctatagtcacagctaccagggaggctgaggagggaggatcacttgagcccaggagtttgaggctgcagcgagtggtgattgcacaactgcactctggcctgggtgacagagcaagatcctgtctttttctaaaaaagtgaaaaataagagaaacataaaacactaaggctaagagcttagaaccagaggtgttgacaggggtagactgagagttaatggagtggttgacgggccactggataccacacgaagctggggcccagtgcccatttgtcagaggagaacactgaggtgtaaggaagctaatcccctctgcccaggggcctcacagtctgggaggggtgatggggacttggaatctgagactgtcctagcaccaaaggtcaaagtttagagggtggggggtgccgagcgcccactcacccgtgtccttcccttgcagcccctgcccacacccccacacctgcaggcggagccagagaaccaccagtaccaggtatggagctgggagctgggaggggtggtggggatcccacggatccaggagccccgaagccggggtggggaggggtcaagacaactgaaactgggggctttcctcccctcgtccccccaagcctcacggtctctgctctcgaagaagcccaaaccgcctccctgagagaccctggcaagtcccttttcctcccaaggctgcaatttccttctttgcaaaagggatccaaaaccttgaacttgcacaggaggaacaaggcccagagagggacaggggattgcctggggccacacagccagtcaggtccccagtgaaaccccaccgcagagctcagtccctctccatcccctcctgtcagctgtctgtccctgtagttctgtctctctctctcagtggcctacatatgtctgtatgtctgtcttcccctttcttggactctctctctctctctctctctctctctcagtttctcttgctgtgtcctttttaatctgtctttctgtttccagtttgttcatgctgccttgtctaagatgcatctctttacatgtcttcgtttctctgcatctctgtctctctctctctccattctctgtctctcctgcctctttgtctctgtcactgtgtccacctcatttcttggctcttccaggacctcttgtctctgcatctcactctctttccaccttgctcttccattctctctgcgggtttctctccatctcacgctgtctctcatcctctgtccctctctgtctccccaagactctccccctccacccagtcataattctgttctctcttccccccaagcaggacctgctaaaccccgaccctgccccctactgccagctggtgccaacttcctgatgggtcctgggccaggccagccagggagaagacaaggccccagccctcctctgggagcctcacacctgagaccagcaggacaaggccattgggggctgtggggccgatgaggtggactcagccaaagactcagcagcacatggggcaggtgtcctggcagggggacaggagactgtaacaggcccaggtccttgtgcagcccgtgaatgcacgcccgccttcggtctgttccttcaagcaagctggcctgggccatgtgcctgtgaaaggcaggctctggcccctttccatgccaaagtcccccaagatctggatatctggggacaagatggtggcctcaggcctgcctcccaggcagttggctgggctcccaactgtctgtcctcaatgccctaccccaactccactagtgaccctcagagtcttctccccttaggacaaggcagacaccccaccatgcgggcctcaggtggcagagaggcccagcctcacaggcctgtggccccacacaccagtcccagcaaggtgaccacggctgctggaccccttccctgttcaggcaggcccagcccctctcagaacctgctgccagctgctggtcttggcccccaccctgaatcttactgagtccctctgggcagcagctcccttctccaccccaccccagcacccgtcccaaatgtggcctcagcttgtcctccccttccccaaactatgcattcattcagcaataaatgagcctttgctgtatgccagacccagttctaggctcttgcagccctggtagaaagcaaaacaaaaactcccgctttcccagagggtcacttggcaggggaaagaatcaggaaataaaataaataatgaacatgcgttgtctgtcagatggggataagtgtattggggaaatggaggggggtcgagagtattgggggactgagatttttaattagggcacagaggtcctcgctgagaaggtgacaaatgagcaaagacttgtaggaggggaagaaaggagccatgtggggctctggaggaagagcattccagacagagggaatagccagtgcaaaggccctggggcagaagcatgcctggcatattcaaggagcagcaagggggctgggcatggtggctcacacctataatcccagcactttgggaagccaaggcaagcagatcatttgaggtcaggggttcaagaccagcctggccaacatggtgaaaccccttctctattaaaaatacaaaaattagccgggcatggtggtgggcacctgtaatcccagcaactggggaggctgaggcaggaaaatcacttgaacccgggaggcggagtttgcagtgggccaagatcgtgcccctgcactccagcctgggtgacagagcaagactccacctcaaaaaaaaaaaaaaaaaaggagcagcaaggaggccagtgtggtggagagggtggggaaggaggaaaaggtgggtggaagttgacgtcaggagatggacggaggggcacatggcgcagggccaggtaaggcactgccgagactgtggctttgaggggcagggtgctgtgaaaggcgaataacggccccccagtgacgtctacatcctaatcccctgtgaatgttacgttatatgacaaaagaatgcagccatgattaagttcaggatcgtgctttggggagattatcctggattgccctggcaggctctttatgtaatcacacagatccttataatcgagaaggacacaggaagcgtgagtcagaggggctgtgacaacaaaggaagcaaagccctttgaagacgggagaaggagctgaaagtcaagcagcacttcagagtcagaatgattgagtgtgagagagtccatgggccatcgtgagtgttgaagacggaagggggccttgagctaaggaatgcaagaaacttctagaagctggaggagggccaagctcagtggctcacgcctgcagtcccagcactttgggaggccaaggtgggaggatcgcttgaggccaggagttggagaccagcctgggcaacatagcaagaccccgtctctacaaaaaaaaaaaaaaaaaaaaacagaaccgagggtggtggctcatgcctggaatcccagcactttgggaggccgagacagggggatcacctgaggtcaggagttcaagaatcagcctggccaagatggggaaaccccgtctctaccaaacatagaaaaattagccaggcgtggtggcgggtgcctgtaatgccagctactggagaggcagaggcaggagaatcgcttgaacccaggaggcggaggttgcagtgagccaaggttgcaccattgcactccagcctgggtgacagagcgagactctgtcttaaaaaaaaaaaaaaaatcagaattgaggaaaggcaagaaaatggattttcttcctacaacctccagaaagcaacacagtcccgctgaaaccttggctttagtgcagtgagacccattttggattcttgacctccagaactataagataacaaacttgtgttgttttaagccactaaatttgtggcaattttttacaggaaatgggaaactaatctagaggatgaggaagaaatcacagaaggagaagttgcgtctcatgctgactcagtatgcaaatactctctgggagacttctccatcctcagaccgctccagacaccaaatgcctgggcctttgaccgccttgctaagagggtcaaccaagccagccaggtagccagggctcagggctaggagtgtgaggggattccatcttttctctctctttttttttttttcttttttgagacttttcttttttgagtcttgctctgtcgccgaggctggagtgcagtggtgcgatctcagctcactacaacctacgcctcccaggctcaagcaattctcctgcctcagcctaccaagtagctgaactacaggtgcacaccacctcacccggctacttttttttttttttttgtattttcagtagagacaagtttcaccatgctggccaggctggtctcaaactcctggctctgcagacaggaggactgaaatccatggtggcagacgcctataatcccagaactttgggagaccaaggcagacggattacttgaggtaggagttcaaggccagcctggccaacatgctgaaatacagtctctactaaaaatacaaaaattagccgggagtggtggtaggttgagacaggagaatcgcttgaatccgggaggcagaggttgcattcagccgaggtcatgccactgcactccagcctgggcaacagagcaacactctagaacaaaacattgacagaatttgtttctggtttggatacaggggattggagagaagagtgtgccaataattggtttgttcatcaattcaatgaagatttattgagcatctgttgtggacagccctattctaggttctggggagacagccatgaatgagacagtgatggctgcttttggagagctgaccttctagtgggagacaggccacagaaaaacaaagcacatggaacataatgtcagggatgacgatgctgtgaaggaatggagcaggtgctaagaacctactggaacgggcatgcttaagaggtgctggagagggtcaactcttgggtgactgcttcgagcaatgggagggtggggagcaggggtgttgtacacactgcgacagggccaggtttgcaaaagaaatcaagacatggccacacaaacacttctgtgtgactgttcacagcagcattattcacaatagccaaaaggtagaaataacccaaatgcccatgaacagacgaatgagttcttttgtttatttgttttgttttgtttttgtttttgagacagtcttactctgctgcccagactggagtgcaatggcgcaatcttggctcactgcaacctccacctcctgggttcaagccattctccttcctcagcctccggagtagctgggactacaggcgcccaccaccacgcttggctaagtttttgtatttttagtagagatggggtttcactgtattagccaggatggtctcgatcgcctgacctcgtgatccgcccaactcggcctcccaaagtgctgggattacaagcgtgagccaccgcgcccggcacggtatttttactgtatcttttctatgtttaggtacacgaatatttatcattgtgctacaattgcctacagttttcaatgtagccacaggctatgcaagtttgtcacctaggagcaatagcctgtacctataccctagatgtgtagcgggctctaccatctaggtttgtgtaaacacattctgtgatgttcacacaacaatgaaatcgcctaaagactcatttctcagaacatatcctcatcatgaagtgacgcatggctgtattatccagtggaacattattcagccatgaaaagaaatgaagccctgacacatactgcagcaaggatgaccctgaaaacgctgtgctaagtgaaagaagccagacgcaaaggactccatatggtagggtcccattgctatgaaatgcccaggcaattcatcaagacagaaagtggatgtagtagttgttgggttgggaggaagggcggaatggggaagtgactgctcatggatacaagctttctcttaggggtgataggatgttctcaatgttttgtttgtttgttttcttttgttttgttttgttttttgagatggagtcttgctctttcacccaggctggcatgatctcggctcactgcaacctccgcctcccgggttcaagcgattctcctgcctcagcctcccgagtagctgacatcacaggtgtatgccaccacacctggctaatttttgtatttttagtagagacagggtttcaccatgttggccaggctggtctcgaactcctgagctcaggcaatccgcccacctcagcctcccaaaatgctgggattacaggcatgagccacggcatctagccatgttctcaaattgattgtaacgatggctgcacaactctgtgaatttactaaaagctattgaattgtacactttattttggttttgttttcattttaagagacggggtcttgctctctcgcccaggctggagtgcagtggttacgatctgggctcattgcagcctcaacctcctgggctcaagtgatcctccttcctcagactcctgagtagctaggattacaggcgtgcaccaccacgcccggctaatttttgtatttggcagagacggggtttcactgtattgtccaggctggtctcgaactcctgacctcaagtgatctgcctgccttggcctcccaaagtgctgggattacaggtgtgagccatggcactcagcccgcattgtatactttacatggatgaattgtgtggtatgtgaattacaccgcaaaaccgtttaaaaaagaagaaagggtggagcctttctgaacctattctggttcagaggctgccagattcgcaaaatattttttaaaagaaagagagaaatggggtgggggagggaggaggagtgtgggggggaagaggtggagaaagaaaagaaagagaaaaaaaagaaagagagaaagcaagcggggaggaaaagagggagcgagggagtggggagagaaagcaggcgggtttgagaggtcagtactgagtcggcaggaggggatagctggagaccggggtcggggtgtgtgagtggggacagtgaacataagtgcatcttgtagcacctgattcattgtcactccagaaatgtcaccttctttcactgtttggggtttgtgcttattgggtcgtcactattgccagacttgctgcaagagagggtcagccctgagccagcagggggcagcagagcaccacacagatcatgcacaagcgctgcagctaccttgagcccccccatgcgcccaccccgtctctgcccctttctttacccctctgggaacccagagagtctatccagctctccaaccccaaacctggacacctccctccccactctcacggcaggcaccaggccctgccctccaggcctcttgaacttggccttccccagtacctgcagcccagccctgggccaggcagcttctctcccctccctgccccagcctcccgcctggactcctccccactcccattctcctaccacagagcagcccaagggatctttctaaagcccaaactcaacctagccccttcctgctcaaaaccatccatggctccccagtgccttagagtccaagctcctcaccactgcctccaacgcctgcaaagtccaggggacgctcagtctcatctctcagcacccaccgccctctcaccttcacccctggtctacagtcccccagatttaacttctttctgtttccccacacactgtgttccatctcacttccaggcccttgcacacccccaggcacacagctccactcttcctgcccaccccattcaccctccaagtctcaactcatacacctcctcctccaggaagccctccttgacctccaagctgggtcagatctctcctgtgagctcacctaccccagccccgcccagtctgggccatcactgcctggggatgggtctgtcccgctgaactatgagccctataagcacaattgctatctccatcactgaggggctcccagcactgaccagcacaaggcagaggcccaaggagtgtggatgctcattatacacatccttccctttcccaacctagcagtccccattcattcattgacaaacgtctgttgagcaactactatcaccaaactctgttacatgaacttgactggcatgagagaggtgaagataaaccagcccagctcctactctcagggagcttgaggtctagtaggggagatgacctggaactcaatgtaataataataattaataataaacattaccgagcacttattatacgccatgcactatgctaagggctttacatttattcactgatatcctcacaacggttctgtgag[135 bp omitted]accctgtctctactaaaaattagctgggcatggtggtgcatgcctgtaatcccagctacttgggaggctgacgcaagaaaatcgcttgaacccaggaggcggaggttgcggtgagctaagatcgcgccattgcactccagcctgggcaacaagagtgaaactctgtctcaaaaaaaaaagtaatggcaaattggctgggcgcaatggctcactcctgtaatctcagcactttgggagaccgaggcgggcaaatcacaaggtcaggagtttgagatcagcctggccaacatggtgaaacccatctctactaaaaatacaaaaaattagctgggtgtggtggcaggcgcctgtaatcctagctactcaggagcctgaggcagaagaatcgcttgaaccagggaggcagaggttgcagtgagccgatattgtgccactgccctccagcctgtgggacagagcaagactccgtctcaaaaaaaaaaaaaaaagtaatggcaaaagccacaattacttttgcaccaacctagtactgtgattatccccattttacagatgaggaaactgaggttaagtaagtgaagctgaccaggcaaagtggcttatgcttttaatcccaggactttaggaggcaaaggcagaaggaccgcttgagctcagaagtccaagatgagcctgggtaacagcgagacccagtctgcacacacaaaaaaatttatttatttactttcatttatttatttatttatttattttgagatggagcctctccctgtcacccaggctggagtgcggtggcacgatctcggctcactgcaacctttgcctcctgggttcaagcgatttctggcttatttttgtatttttagtagagacgggggttttaccacgttggccacgctggtcttgaactcctgacctcaagtgatccacccacctcggcctctcaaagtgctgggattactggcgtgaattaccgcactgggccaaaaatatttaaaaattagccaggcgtggtggtgtgtgcctgtggtcccagctacctgggagactggggtggaaggac[153 bp omitted]ttctaacaccgaaaatttgtcttctgctcatcccagcctgaaaggaaggtgaaccaagatgcaatccatgcccattcaagtggggtctgtgtgtccaggcagaggtgtctgccctctacaaagggcacaggggagagagtgatgcttaacccaaaggaggtctcgctgatggtggaatttcaggcaccgtgtttatgtttggcctaattagcttgagaccagtgtccttgacgggaactaagacgccccccacgcccatccccggctcccaggctctctccacccaagttctgcccaccagggcacactgcttccctctgccacctcctcttcccacgagccctggtacaccctagattctcagggctgtggctccttgctttacaaatgagtaagttggtggcagggaaggaagtgggctgggccatgaccaagagtcactatgattcacggggaaaaccctgccctcccgattcaactctgtgtgcaaaaaggttttgtgcgggttcctagggtctcagggtcaatggatgtagatagaccactagaggtatacacagccactgtccaccaactctcccaccccccgggtctgcctacagccctggatggggatcctgtaccgggggggcggttggggggttggacaggtgtgggttgaggtgttgtttacatgttgaacacactggggttccaggtaagtttccgtcagaagaaagcacttcactgctgaggcagaaatttcaaaatattgaaccacttttcgatcctggcagaagggaattttcccagggtgataaaagtgttctaaaattagatttgagtgatggctgcccaaaaggaattatgatattattcaagaaatcatggctttgctgaacaacagaaaactcgaacactgagcatttgaagatattaaggaattgttgatttttatgttcactgtttaggtgaaatgatagcattgtgagtgtgttatttttaaatgagtccttatcttttaaagatacaggcagaaatagctataaaatgatctgatggctgggatttgctttcaaataatacaggagagggccgtgggtgaggagagggaaccagattgcctatgagctgagtgatgggtatgtggttgcgagggcagacaccattcttctctctgctttcgatgggtgcgtagaatttcccataataaaaagtggtttttaaattgttttgaccattggcctcgcgcggtggctcacgcctataatcccagcactttgggaggcagaggcaggcagatcacttgagggcaggagttcgagaccagcctgggcaacctggtgaaaccccatctctattgaaaacacataaaaattacccgagtatagtggcatgcgcctgtaatcccagccactcgagaagctgaggcaggagaatcgcttgaacccgggaggcagaggttgcagtgagctgaggtcgtgccactgcactccagcctgggcaacagagcgagactccatctcaaaaaagaaaaaaaaaattgttttaaccattctaaaggaatgagaaaagaattctacaacttttgtttttttgtttttttttttgagacagagtctcactctgtcccccaggctggagtgcagtagcgtgatcacaacttactgcagcttccatctcctgggctcaagtgatcctcctgcctcagcctccagagtagctggaattacaggcatgtgccaccatacctggctaatttttttttttttttttttgagatgaagtttcactcttgttgcccaggctggagtgcaatggcgggatcttggctcactgcaacctctgcctcctgggttcaagcgattctcctgcctcagcctccccagtcgctgggattacaggcatgcgccaccatgcccagctaattttgtatttttagtagagacggggtttctccatgttggtcaggctggtctcgaactcccgacctcagatgatctgcccgcctcagcctcccaaagtgctgggattataggtgtgagccactgtgcccagcctttctttttattttatttttagtagagatgggactcactatgttgccctggctggtctgaaactcctgggctcaagcaatcctcacacctcagcctcccaaaatgctggggttacaggagtgaggcaccatgcccaacccaggcctaaccataattctaaatccaagtccaaccccttcccactttcctgaagggaaaaatgaggtgcagagagaggaaggaacccctaaccaggtccctttagggtcccaagagaaccctggcactctctgctggcctccatccccctaactctgcccttcacttcctcccctccagcaccttccagaaaagctctaggtggctagtccccctctgaccaccttctcccactttcccctgcccctcactcagctccagtcacaccaggctccctgctgtccttatgctcatcaaagcccctcctgccccagggccttgaattcacttgttgtaccttctaccaaaaacactctcctcccacacacccacaggctccctcctctgtcgcctccttcaggccagaaaaagcgccaccaccaccacctcccaaactaaaacagcaacccctgctcctctctatccacttgccctattttatttaattttatttattttgagacacaatctcacactgttgcccaggctggaatgcagtggtgcaatctcagttcactgcaatctccacctcttaggctcaagcaattctcccaccttagcctcccaagtagctggaattactggtgcacaccaccaccacgcctggctaattattgtacttttttgtagagataggatctcactg[135 bp omitted]taaatgccatatcaggttttttttattattattattgcccatctccctccaataggatttagcccaacaaaggaaaggatgtctctgtgcaaacagcctggtacatagtccatgcttgacaaatatttgttaaatgattgaatggcttggaaaaacccagatgaatgaggtgaggagggtggggacgggtatccaagcacagggaacagcctatggaaaggtctggagcttctccgatccacctgcctcctctcctgcatggaagcctaggtgctttttttttctgagacagagtctcactctgtcacccaggctggagtgcagtggtgtgatctcggctcacagcaacctctgacttccgggcttaagtgattctcctgcctcagcctcctaagtgtctgggattacaggtgcccaccaccacaccgggctaattttgtattttttttagtaga[139 bp omitted]gaattaaggggacatttggtcctttctccccaagaacaacctctccaggcccagccagagccaactccaggccttgacaggccggcacaggaagccacaccctgagcaaatatgacggccccctctgcctcgcccaagataaggggaggttgaaaggggtttggaaacctgcttcagcctaagacattagctccagccaaaccctcagtctcaaggcctccccacccctgcccagagaggacaggacaaggattctgccacggaggcccaagtctgacgtttacatctaatatatattgatgatgtcagtggtgggcagggtcttgaagagcagataaaggagttcccagcctccctcccgctcccaaggaaactaagtgactggtgagacaagagggctgggcgggcaaggggtgaccctgaccaaacaaggtcatagacccgtgtccccagatggctgtgcagagaagataagactcatctgctccaatcttatgaggcaatggcccggggcctcagtttacttgtctgcaaaatgggttttcttgggggtgggcagcggggagatggataacaggaaaagctgaagctgtcaaaaagaataatgggccaggcacggtggctcacacctgtaatcccagcactttgagaggccaaggcaggtggatcacttgaggttaggagtttgagaccagcctggccaacatgtcaaaaccctgtctgtactaaaaatattaaaattagccaggcatggtggcgcatgcttgtaatcccagctactcgggaggctgaggtgagagaatcgcttgaacttgggaggtggaggttgcagtgagccaagatcgcaccactgcactccagcctggatgacagatcaagactccatttaaaaaagaagaagaagaagaagaagaagaagaatgatatcagcagaatacatctacaagctgaccacttctcccatccctggttcagccgccactacctcctgcctggtccagcactacccaacaggagcaagagtggagccgcaaacacaattcaaccttttccagcctcatctcatgaagaaaggtgaaacgaatgtatttaacacaacatatgcaaaatgtcatttcagcacagaatcaatataaaaaactgattatctgttttacattattgtgtatgcatgcgctcttttttttttttttttttcttaatgagacaacaaggtcttgctctgtcgcccaggctggagtgcagtggtgagatcacagctcactgcagactcaacctcctgggctcaggcgatcctcctacctcagcctgccaaatagctgggactacaggcgtgcaacaccactcctggctcatttttaaatttttttgtagagacgtgctctacgctgcccaggctggtctcgaactcctgggctcaagccatcctcccgcctcagcctcccaaaatgctgggattacaggtgtgagccaccgcgcccggccccccttattgaacctctactccaatgtcgctctgacaatgtcgccttgctgccctgcataaaccagtgccccgaccacctccatcccttcccctgctttatttttctccacagcattgtccccacctgttctaacactgctcatgtttgtattcgtctattaactgtctccccaatcaataggtcagctctgtgtctaccgtattcacggctgtaaccccacagcgcctagcgcagtgcccggcacatagttggtgctccataaacatttgtcaaatggtggaggaacaacgaccactgtgcccccagtacgtgctctgaggcaggcccggcacggaacactccatgtgcctattttgatcctcagaagagtcccagggaagtcaatgtcatgaacaccccccacccactgcacaaacaggaaaaagcccctgcccacaagaaccccgtctgctttctgcgcagcccggcggcgcacagcaggtgctaaagagcctgcagctcttgactgaaccaaggatctgggctcacagccgggagcaccagaggaggggccagggaggtggaggatgggggcagactaggaagggtggatgtgacgatagagggcctctagagcccggcctggtcacactccgcaggcagacagcagatcaccaggaacctgagcctctctgaagactcctctctctgtgtcatccacacctggtgtccagttccacaaacatgctgtgagcctctgctctgtgccaggtgatttgctgggcagtgctggggacacagtggtgacagcccagccgtgcccagctgaggctcccaggccagtgggggaaaaagacccagccccagacagcgagaacccaaggcagtcagggctgagacagggaattccaggccctgaagtccaggagggcttcctggaggagagggtttggggaaggcagtggaatagagcagagggaagcagggatattctgggtagagtgcaagtgaaacagaagaactgaagcagagggttcccggaagcaagtggtattctatgtagctggtcaggtgggcaggagtcaggccgggcagggcctcctgggctacagtgaggaacctgggcttcctcccaagggcactggggagccacagcaggttctgagcacggaggggcagaggcaggtttttgttttggaaagagcctctgtctgccatgtggaggggcaatgggagtcggggagaccagggccagagactagggaggaggctggtggggagacaggaggacccaggcaaggtggggtggtggagtggtcacctagaccagggcaggggcttcagggagggagagaagatatacgtagagtcagttgccagaaggggtggcgtgttcggggagtagggggaggcatcagggatgaggccccaggtctcttttcccagcgatgaggtgggtagtggcgccttccctgataagggcaccaggggaagatacacttctgggggaagatgccaaggtcagtttgggacaaggtgagtgagaggtgcccagggacatcagggaggcatcctgattgatactgggatgaggtcccagtgctctgggccaggacgcagaagagtgaggtgaggtcacaggtggggagaggggagcaggaggcgccaggacatcctctgtgcctctcacctggcctcacccgcacctcctcagggccttctcccccttgttagagccctgccccacgagggcagcccaggacacagtgctggaggcaaaccaggacaggtgagcacaggtgtggccccctgcccggaagcaggctgcagaggcctcagaggaaccaggactcagaagccatcaggatgcaggtcataagaacacagctatcagcagctctggcaccacaaccccctcggctcctgcccagcatcatctcagagacaccttccctgttaccctccctccaccccaatttaaagtagcaaaccaggccaggggcagtggctcatggctgtaatcccagcactttgggaggccaaggtgggaagatcacttgaggccaagagtttgagaccaggcagagcaacatagcgagatcccatctctacaaaaaataaaatggcaaatcccctttctgactttatttttcaatctgacgtggaagatatttacctttcctttatttactccgcaaatgtcggccccctgagggcagggatttcatccgtcttgtgcacggctgcatcctcagcgcctagaacagcacctggcaaacaataggtgctcattcagtatttgtccaataagtgaatgagtgatttactgagcatttactctgcgccagtcgtggtaagtactgtacttcacatgtgtatctacttaatcctttcaacagccctgtgatgtgagtactattgttttccctattttacaaataaggaaactgaggcttggcagagtccataaattgcccagggtcctggaggtaggaaacagtggaactatgtccagagcctatacttttttttttttgagatggagtttcactcttttgcccagggttcaagcaattctcctgcttcagcctcccaagtagctgggattacaggtgcccgcgaccacacccagctaatttttgtatttttagtagagacagggtttcaccatgctggccaggctggtcttgaactcctgacctcagttgatccacccacctcggcctcccaaagtgctaggactacaggcatgagccactgcgtccggccatgagccaccacgcccggccagagcctatacttttaataacaggcataccaatcagacccacgtccaccaggctctggcttaaatccctgacttgtagcctctcactaactgctgtcaacaaacctgaagtagggtccatatcatctctatttttttgtttgtttttgaaatggagtcttgctctgtcacccaggctggagtgcagtggcaggatctcggctcactgcaacctctacctcctggattcaagcgattctcctacctcagcctccctagtagctgggattacaggcatgtgccaccatgaccggctaacttttattttttgtttttgcttttgttttttgagatagagtctcactctgtcacccaggctggagtgcagtggtgtgatctcagctcgctgcaacctccacctcctgggttcaagagattctcctgcctcagcctctcgagtagctgggactacaggtgcacaccaccacacccagctaattttttatatttttagtacatacgaggtttcaccatattggccaggctggtctcgaactcctgacctcgtgagccacctgccttggcctcccaaagtgttgggattacaggcgttagccaccacacccagctaacttatatttttaatagagacggggtttcgccatgttggtcaggctggttgcaaactcctcacctcaggtgatctgcccatctcagcctcccaaagtgctgggactacaggcacctgccaccacgcctggctatttttattattattatttttagtagagatggggtttcgccatgttggccaggctgatctcgaactcctgacctcaaatgatccgcctgccttggcctcccgaagtgctgggatgacaggcatgagccagtgcacccggccatcatctctatttatcagaataataaatggagactcaacaagggactgtccccagccccactttgggtaagtgcagagctggtgtcaaaactcagctctccttggccccaaagcctccgaatacgcccatttgacagagaggggaaaacaaggcctccgaagtgggagaaagagaatgtgaacttctgagcactttgcaggaagccaacaagaaggagagccccaaagaaagcatgtggccatacagtttcctgcccttctgtctgggtttgcacacagagcagggctcaaatcccctctccctgcaggaacccggacaagtgggagtccccacctagctcatctccatctgcaaaggggggtcctaaaggtgcccactttacagggttgttttgccatccgctgagacaacacctgtaggtcccctgcactgggtggggctgggaaaggtgcagtcaccttttactgattttcttccttggtgactcccaggctctctgaggaggccacgggcctgggtggttggtaagaactacccgaaaaccttcccctacttttcctctcttctcctcggtgacctggttcctctcccagtaccaaatccaggccctcggcacaaagagggttaggcggctgccccaggaggcctgcccaggtcacggcctctggccggtgcccgccacacccaccctggtacccaaaccgggccccagatccttggtgactcgatccctccaaattcaggtgatctcccctggctccaaatcaccaaaccctcccaggtcctgcggcagacggagccgagccccaaccaggaagggagtccgagcactgggacttcaacgccaccatctccaagactcggtttggggtgaaagatggcgctgactgggtacagctggctgctcctcagtggtgagcgagaatggcaccccccagcacctcagccccccgaggaccccagggaggggaggggacccccagtctgagagagggaaggtgtgagcagaagtccagcgtgctagggagggagggcagccctgcttcacaccggcagtttacccctccaagaggcatctgcattgggcaggctggggacagccacccagagaggttttcagggtgggctttggagatttctaagcccagggcacaagccaggacaagggagccgctgttgctccttcattcctgcaggtttctgttttatcagctatggaagccttgatgaggctaaactcttcccagcagctgtttctcccggaagatgtagcttagggcagttgcctttcccttctcagcctctgtgtacccacctgtgaatggggcctcactgacagggtcatgtaaaggtcattataagcagcaccacatatgccgtgtgcccggagctgttctgagagcttc[131 bp omitted]accccatctctactaaaatacaaaaaattagctaggtgtggtggcacatgcctgtagtcccagctgctcgggaggctgaggcaggagaatcacttgaatccaggaggtggaggtcacagtgtgccgagactgcaccactgcactccagcctgggcaacaaagcaagactccatctcaaaaaaaaaaaacaaccccaaaccacctatgagggaggcccacacatgaaccgcacttcatagggagaaaacgaggctcagaaaggtgaaaccattggccgctgtcacacggccagagagtggcaggactgagggctagacccagagaccctcactcctagccacactctaacagcctggaaagtaccagaaagctggccagccatgtcagtccttttgacgtgagcactgtcacagccgcccgttccgggcattcaaaccacacgtcattcaaacccaagcagccccgaccagctcatcgggcttggggctgatctgcttggttgagaaggaaaggggtggagtgtgttcatcttacccctgctttccgctgtaggcgagcttggagaggcagaggcagagccccagactgggagtcaggacccagggggcaggccctgacatcctacgtggggccatacaattagctgggctggatacgcagccggatctcgcgagacttagtttggtgactgtcacgatgggaaaaccctttgggtccggcttaaagccgcaggtcctgtgggccgagcacttgctttgcacttgctgtatgcaagatgtgatgctagatccttggcacagtccatcagacccaatcctcacaacacacgcctccctccctcggactgagtccctccctgggactgagctcctgcatctgactaacatgtattgggcacttactgtataccaggcattgtaagcatggtatgtatacagaatccttacaaccttaccaggcaggtagacctgtcatccccatgtgagagttggaagaacagaaacacagagaaagacagtgtactcgaagccatgcagataaactcccagaaagattaggtggctgagatgttgagagtcagagttgcaggttcaaatcctggttttgcctgtcctcatttacacagaggacactgggctggggacatgccccgagcctgagtctcttcttctgtcaaatggggcgattgatcaaacctgcctcatccaacccctctgactcctcttcctcagccacattcctgaatgtgggggccgagatctctatcaccctggagcctgcccagccgagcgaaggggacaacgtcacgctggtcgtccatgggctttcgggggaactgctcgcctacagctggtatgcggggcccacactcagcgtgtcatacctggtggccagctacatcgtgagcacaggcgatgagactcctggcccggcccacacggggcgggaggctgtgcgccccgatggcagcctggacatccagggcatcctgccccggcactcaggcacctacatcctgcagaccttcaacaggcagttgcagaccgaggtgggctacggacacgtgcaggtccatggtgagacaccccccaacacccgcctctgccccagctgggccttcccatctccttctcaatccttcttttttttaaaaaaaaaaaaaatccaacaaatcatcagggaaaccatcagggaataagtttctaaaataacctcaaaatgctcacctccttcaagatggcctccaggattagacctgcctcctaaaaccattctttgtccctccggctgagggtgtgggggcccagccacaatccggccatgccccttgttgggggaagggaaggccctcagagcaggtggtgtccggccccctccccctctgtctcttgcccccacagagatcctggcccagcccacagtcttggccaacagcacagcgctggtggaacgtcgagacaccctgcgccttatgtgcagcagccccagccccaccgccgaggtccgctggttcttcaacggtggggccctgcccgtcgctctccgcctgggcctgtcccctgacggccgggtgctggccaggcatggcatccgccgggaggaggccggcgcctatcagtgtgaggtgtggaacccggtcagtgtcagccgcagcgagcccatcaacctgaccgtgtactgtgagtcctcctggccccactggagatacccagtgtccaaacctcatggatggggaaactgaggccaggagagggggcctaagggcacacagcgagtcagcaggcaagctgggattggggaccagggacccctcttaaagtgcacttgccctcgccaggtgcagtggctcacgcctgtaatcccagcactctggggggcctaggcgggaggatcacctgaacccagaagtttgagaccagcctgggcaacatggcaagacctcatctctaccaaaaaacataaaaattagccaggcatggtggcacatgcctgtagtcccagccactcaggaggctgagatgggaggattccttgagccccggaggccgaggttgcaggtgcagtaagctatgattgcaccactgcactccagcctgggcgacagagcaagatgctgtctcaaaaaacaaacaaacaaaaaaaaacaacaacaacaaacaaaaaaaatacacttgccccatatcctaaaggacttctacagaccacctttactattgaataatccttcagttaggagcaatatctacagagaaaggaaacagggccagttggtttgaaaagggagcaggggagggaatagtgtaatgggaggggacacaaaatttaacaacataaccaaagcatgcagtcgttcccaggagcagcagatgtgcagtgtggaatcctgggaaaataaatcaccaaggtacatgaggacccatgatgtagaaaaacttagtgcctacaatcctagaatcttacaaccagagaattccagacttcagaagcactgaattccagactctgagaatcttagaacctctagacgcagagattcttagaatcttagaatctaaccctgaaatcttagtctagaatcttagaaacatagatttctagaagcttagaaccttagaacctagaagcaccaattcttgaagccctagaattctacactcttagaatggctttgtcagaaaaaaaaaatcatttaggctttttttatttgtcaatggagccatagatttcaaaaataccttgaaatattatcttgcccaacacattctttttacaggagagaaaggtgagatcctcttagagggagtgattctcaagatcctagaacaagttagagttaaggccagagctttttttcccctccactaggccaagatattcccagggacctagcttggtggagagaaaaccaggggtaccaacctccactcctccttccctctactgccccatctatctccctcctgcccccacagttggcccagagcgtgtggccatcctccaggattccaccacccgcacaggctgcaccatcaaagttgacttcaacacgtccctcaccctgtggtgcgtgtccaggtcctgcccagagcccgagtatgtgtggaccttcaacgggcaggccctaaagaacggccaagaccacctcaacatcagcagcatgacagccgcccaggaggggacgtacacatgtattgcgaagaacaccaagaccctgctatctggatctgcctcagtcgtggtcaagctctctggtgagtcacccccagcctgaccaccccccagtccccatggaggcctcatcaggctgcgaaggttaagccaccatttgcccaacagagaattggaacatggtagattcacagttcattcatgagctgtgacaaagtggcatatcaggcagatctgtttgcatctgggtctaaagagagacagcccgtgtcctgttcacctagagaacaaatggcaaaccattgtgggttgacagagtggaaaatcactcagatatcacttcaggtgggtgccactgctctaaattcagtcaccagctgtttagggccttgaccctctacccgcccccaccccaccacacagacagctgaaattctgtgcagccaactagactacccagttatctgacccagatgatgggtatacacacacacacacacacacacacacacacacacacacacacaactgaagaatcacagccaattgctggcaaatggagaaacagctggggaggcattgtcatcttgcttctgtcctaaaatgacctgagggctggggcagtgcaggcagctggcatttcagagccattgggatcctcaggcgacattttctcatcttccggagatggtggctttgaacattaaggcctcattaattctacctcggttccttcccaagtggccatcagcccccgggggacagtggggaatggtcgttccctccctcccactaacaggctgggtctcatccaaggggtggattttcacccaaagcagaaatggcatccccagaggtaagtgtgactcccgctccactcatctggggctttggcagctggtcttgacaggagacagggggatggaccagatgacctcaggcgccaccccaagccctgtctgtgcagtccaagaaggggggtgtccaaggtatgcaggtatgtgcagggagtggatacagtgcccccaagggcttctagcactgtcagcaactctgtggcaggtgctgggagagacacagaagaaaaggagacgccaccctccctccaccttgggagactaatctgatggaggagacaaggcctctgtccttggagagatgatcctgggacagggaaacatggctcctttattcaaggaatagctgctcaaagagaagaggcaatgcctcatccttcatgtcagtaatgagggagatatgacaacccaccctcagtgagctcctagtcagatggaggagacacagtctgcacttggggagaaatttccttctgatggggagacttggtctccaggagacatggccctgttttttgagcattcctagtctgatggggtatccacctttggggtactcctaatctgatggaggagtacaggaccccactttctaggaatttccagtctgatggaatagacatttccctctaacttccagggtccccaacttgattggaaaaactcagcaacaatttagaatttctcaatctgatggaggaaacagggctgccgccttgtaggaattttcaatctgatggaggagacatgctctcaccctcaagaatctttcaatctgatggaggagctatggcttacacattctggggtctctcggtctgacagacacaagtcccaaccatctcatggggaagacatggtccccattttctgggatttccactctgataggggagacatggcccctatattttgggaatttccaatctgatggaggagacatgacccaagcctctagggtcttccagtttgatgggagagacacctctcaaagtctgggaatttgtagtctgataggggaaacacagaccccagcagacactactgggacccagaatccacctccaccaccgcacaagtcacctccttcctcagtctccttcccagcaccctacatggggagtgccagccagctggggggaggccagcaagggttgggaaggggacaccatgccagatgcagaccaaactgacccagcccgctcgctctctccccagctgcagcagttgccacgatgatcgtgcccgtgcccaccaagccaacggagggccaggacgtaacactgaccgtgcagggctaccccaaggacctgctggtctacgcctggtaccgcgggcctgcctccgagcccaaccggctgctcagccagctgccgtcaggaacctggattgcaggccccgcgcacacaggccgggaggtgggcttccccaactgctcgctgttggtgcagaagctgaacctcacagacactggccgctacacactcaagactgtcacagtgcagggcaagactgagacactggaagtggagctgcaggtggcccgtgagtgtgtgggaaggggcaaggcgtgcccctttttagacaagggctcccaaaaggagcctttgcttcctccatcaggctggggggacatagaccaaagatggatacccatcccccatcaggctgaaggaagcagccttgtctcctccgcctaacttgggggtccccaaatagggttctgcctcttctatcaaactaatgacctacactgtgggtagacaggcctcctccatcagactgagggttgctaaaggggacccccatgccttctctctcaaataagaggtacagcacactgaaggttttaaaagagaaggcatagtctgatggtggagcatcctttttcctgcagacaggtggaccctaaaacatagggtccatattggggtaatgggttaattataggagtttacctctcctatcagactgcaggcagagaataaggatgaatcaggcctccctattcagactgggagatcctgtgcagtggggatcatgtctcctcctttctattattgtgagggcaaagtttctatcatcagatggtggagtttctctttcaaactgaaataaggatgattgctccattaggatggaggcctgtaggtgtggaagttgtgtctcctcacagaatggaagttcccagatgttggggaccatgtctccccatcagactgggagctcttagaagtcaggaacaatgtctcccccattggattgggaattcccaagtgttggagaccatgtcacctccctcagactgggagctctcagatgttgggaaccgtgtctccccatcaactgggagcttctagagtcagaaactatgcctcctccatcagactaggagctcccagagtcaagatccaggtctcctccatcagactgagagctcccagagttatagaccatgtttcctccgtcagactgggagctcccagaggcagagaccacgtctccttcatcagactgggagctcccagaggcatggtccatgtctcctccatcagactgggagctcccggagtcagggactatgtctccctcgtcagactgggaactccaggagtgagggtccatgtctcctccatcagactgggagctcccagagtcagggaccatgtttcctccatcagactgggagctcccagagtcagggaccatgtctcctccatcagactgggagctcccagagtcagggtctatgtctcctccatcagaccgggagctcccagagtcagggaccatgtctccttcatcagactgggagctcccagagtcagggaccatgtctccttcatcagactgggagctcccagagtcagggaccatgtctcctccatcagaccgggagctcccagagtcagggtctatgtctcctccatcagaccgggagctcccagaggcatggtccatgtctcctccatcagactgggagctcccagagtcagggtctatgtctcctccatcagactgggagctcccagagtcagggaccatgtctcctccatcagactgggagctcccagagtcagggaccatgtctcctccatcagactgggagctcccagagtcagggaccatgtctcctccatcagactgggagctcccagagtcagggagcatgtctcctccatcagactgggagctcccagagtcagggaccatgtctcctccatcagactgggagatcccagagtcagggtctatgtctcctccatcagactgggagctcccagagtcagggtccatgtatcctccatctgactgagcatccccagaggtctgagtccatgtccctacagcagggccaggtttcccccattagctctcagacactggggatgagatcattccccaagtctggaatcttgcctcccccagcagacagagcattctcagaagccatgtccctgagtccgggatggtgcctcccctatcactggaaatttccaggatcaaggactcaaccactgccagtcacccactttcatccagtcactgatcaaaccctggttttctgggtcagtgttaggggagaatgctgttcagtggcagcaggccaccccggcaaagccttgggattccttttcacccattctctcttctcacagtcaacctccctccctcgcacaaggaccaacgctaccttcctgaacctgaacctggcacaggctgagcgtggggtggattgggccactgggtggcccggggtgggcaggggagcagaaggggtgggggcactggggacctggtcctccatctctctgacatcctccttcgccccctcgccccatatgccccacagccctggggtaacagcgtgaccctggagacgtccagagagaagagctcttcgcaccatcctctggtcctcgccctctgagtgggaaccactcccccacagcgaggatgccaggctgtggtcctgctgttctcctgcctccaccctagagctagagccacagggccccactccctcgctgagctgttggggagccaccgaggccataaacgtcctggttaatgcacacgtgtgtcagcctctccttccaccaccgctagccccgccatttcctggtggccgcactcatttcctttcccccccaagacttttctcagtctgggtgtgcacgtgcaggaggatgggcccagatcaccgtgctccacaccccactgctggatgccagggccttgtgcccctcccgcagtgctccaggttatatgtgagagtcctgctccccagctggccaaggactgcccctcttggagcaccagcattctgtgggacatggctctcccctacactgcacctcattttgtcacctggaccccgaaacagggctgcttgtgctcaggaaatgaccatattttgcaagaagtcttccatcaccttctggtagtcctcacccatttaatcaaagacacaactttgtcctgggattccccgcatgtctctccaacattatctgcccaaccctgacaatatctccttccttctgcagccacaggaaaggccctgtggatggatgaatgcaagcggggcagaggtagaggccaggagtggagagctgggaagtgggggccagaatgagtgtgttttctaactcgtctcattagtgggagccacaggccccacccagccgcaatgccccactggaaacaggttcttggcattggtcaggagtggtgatggccgagtcgaggcttagaatagaaagacaggtttgggcagagacgagaaaggcccttttggggatgattgtgttgagttggggtgatgggtggtgaaagacctccagaatgagggttataaaacctggatcaaaatcctgcatttgccacggattcactagagcctcagtttgcccatcagtaaaaaggtgtggacttgaggtggaccagacttttccaaaccatttttaaaagcctcagagccctttcttcaaatacaagtttacatggcaggtcaatttattattaatatttaaaatagcaatgcaacaaatatagccccagcacagtgcccatgcctgtaatcctaacgctttaggaggctaaggtgagagaaacgcttgagcccagaaatttgagaccagcctgggcaacatggcaaaatcccgtctctatttttgaaaataaataaataaataaaaccaactatagataccaattcaatagctatactcgtctcccccaaaatttctatagaattggaaaaaaaattacttaaatttaaataccactgggattagccagacatggtggcgcatgcctatagatcacttgagcccaggaatttgaggctgcagtgagccatgattgcaccactgcactccagcctgagcaacagagtgagactacgtctcataaaaaatgttaaattttacaaataaaaggtaacacttggggccgggcgcggtggctcacccctgtaattccagcactttgggaggc[134 bp omitted]gaggcaggagaattgcttgaatctgggaggcagaggttgtaatgagccaagatcgcaccactgcactccagcctgggcaacagagcaagaagactccgtcaaaaaaaaaaaaaaaaaaaagtaacacttggactacagaagcaactaaaatacaagatatcaaccagaatcaaatgacagtaaaagcatcatatacatcaaacctgtgggacatggccacagccatccttgaagagaaaaatgatagcttataagcattgagagtactaaaggaaaaagacttgaaaatgaataaaacaagctttctactcaagaaactagaaaaagtccacaaaacgaaccaaagaaaaaagctaaggaatgaagaaaggtaaaagcagaaatagatgaaatgtaaaacaaaacatggccaataaaacctaaagctgattctttgaaaatgcaatgaaatagacagactttctgcaggtatgatcaagaaaaaaaaaaaaaacagagaagtataaataagaaacacaaataataaagagccaaggagattaatatataaaataaaaggccctggggtgggcgctgcgctcacacctgtaatcccagcactctgggaggctgagccaggaggatcacttgagcccaggagtcccagaccagcctgagcaatgtagcaagacctcatctctacaaaagtttttcaaaaattatccaggaatagtggtgcatgcctgtagtctcagctacatgggaggctaaggcaggaggattgcttgagcccaggaggccaaggttgcagtgagctataatcaccctactgcactccatcctgggcgacagagcaagaccttgtctctaaaaaaagagagagagagagaaaagagaaactggtctggttgaagcaaaggttgctcaataaatatacattgactgaagagggatctgttggttgctccccagcccactgccctccctgcttccatgacacacgcactgcctccctctctagaagctgaaaatgtcaggtactcactttcccaaactgccttgcagctgcaagcagccatgtgaccaattcaagcccatgaggaaggagagagcctaaagttccacccactgactccacctcaccggaggggacactgagggagctctatggagtttgaaagctattatctaaattagtggtctccattgtggggcttctagctgggacgtgaggatggacttgagcccatactactaaccccaacactatccagcccagaaagaagaaatagcatccatattaccaccttcaccccacccccatccacccaagttcacataaaaacttgacatagatgtggct[152 bp omitted]atagaaaaaattagccaggtgcagtggcaggcacctgtagtcccagctactggggaggctgaggcaggagtatggtgcaaacctgggaggcggagtttgcagtgagccgagatcatgccactgcactccagcctgggcgacacagcaagaccctgtctcaaaaaaagaaaaaaaaattagctgggcgtggtggcaggtgcctgtagtcccagctactcgggaggctgaggcaggagaatggcgtgaacctgggaggcagagcttgcagtgagccgagatcacgccactgcactccagcctgggtgacacagcgagactctgtctcgaaaaaaaaaaaaaaaaaa[131 bp omitted]tgaagccccatctctactaaaaatacacaaaaattagccgggcatggtgtgatcaagaaaaaaaaaacagaagtataaataaggaacacaaataataaaaagccaaggagattaatatataagataaaagggcacctgtaatccctgctacttgggaggctgaggcaggagaattgcttgaacccatggggcaggggttgcagtaagctgagatcataccattgcactccagcctgggtaacaagagtgaaactcagtctcaaaaaacaaaacaaaagaaattatcttcagtggctagtaagaaatattggaactagcataaacaattaggcagaatagatacacagggagtagcttatatggctagaagattatttttctcatttctcaaacgtaaaaaatctccagaagcagattgttcagagctagaatggaggccctgtagtgtcatcagggacacagctccttctattcttctgttccattatccttaccttggggtttccatcctctccatcacctcatggcccaagatggctgctggagtcacagctgcctcatccatgttccaggcaagaagcagaaagaagggaacaaagggaaacaaacaaaaaaaaactccccctagccagtttatggactgtgccccttttaagggaactttacctaaggcccatccaacaacccctgcttagatctgattggccagctcatagtaccatggccaccctagctgcaagggaggcagggaattgcagtcattgccttgggtatgctgctgccccaattaacatcaaggttcttgtattaagaaaggcagagagaatgggtcccgggtgggcagctggcaggcttggccactccaagctttggaacttctacctcctcagctaggcaaaatggccttcctcacctgagcccaaggagtaagagtcacagcccccatagcaggggtttgagaaagatgggagctgctgctctgagctgtgattgtgtgcagttgatgcagaatgaggccagcaggaggggcagaaggagggaaggagaagcagctcaggtttctaggtcaagcaaaatcccatagcctcagggtgtggtggaggctcaaatgtccccaagaccaggtcctccgtccctctgggcatctctgtgctcttttactgaattatctcaagtagtgcaatccccttcattaagagtgtaggaaagaataataacaataaccacaaaataataatcactcctatatctcgagcatcagtgtattagtccattctcacattgctataaagacatacctgagactgggtaatttataaagaaaagaggtttaatcagctcatgattctgtgggctatacaggcttctgcttctggggagacctcaggaaacttacaatcatggcagatggtgaaagggaagcaagcacgtcttcacatggccggcaggagaggaaggtggggtgctacacacttttaaacaagcagcactaggaggatggtgctaaaacattagaaactgcccccacgatccaatcacctcccacgaggtccctcctcctacactgaggatcataactggacatgagatttgggtggggactaagaactaaaccatatcaattggttttatcctttttcatgcaagatctcaattcctacagcagctcttaagagcagttactatcattcccccaacttacaggtgaggaaactaaggcacagagacttgaaaactttgctccaagtcccacagttcccatgtgtcctaggtggaggtgctggtgggggagtcctctccattcttcagcagggcagagggtttcagggcacagctctgaggacagacagaattctttttagctgtgggaacttgggtacattgcttgcttttcctcctcgtaaaatggagatgataatactgcccctgcctcctaggattgttgaaaagatcacattagttaatacaagtaatgagcctgaaacatggatgctcaataaatgcctatgacccagactaaggtgttagattttaacaacaggcagatagaaaaagcaaagataacatttttctttttcttttttttttttttttgagacggagttttgctcctgttgcccaggctggagtgcaatgcatgatctcggctcaccacaacctctgcttcctgggttcaagcgattctcctgcctcagcctccccagtagctgggattacagacatgagccaccacacccggttaatttttttttttttttagcatttttagtagagacggggtttctccattttggtcaggttggtctcaggtgatcctgacctcaggtgatccgcccgcctcagcctcccaaagtgctgggattacaggcatgagccaccgcgcccggccatttttttttttttttttttttttttccagaccgggtctcagcattatccagactggaatacagtgatgcaatcatggctcactgcagtctcccaagcagctgggactacaggcatgagccaccacgccggccaattgttgcattttttgtggagtcagggtcttgttctgttgtccaggctggtctcaaactcctgggctcaagcaatcctttcacttcagcctcctaaagtgctgggattacaggtgtgagccaccacaccctgcttcaaagataacatttgtcctggcgaacttaatcctactaagcaggtttgcttcgctttatgtaatatatgatgttctttacattgtaatcactgagatttgctgacaaaaagtaataataggccgggcgcggtgcctcatgcctgtaatcccagcactttgggaggctg[132 bp omitted]ctgaggcatgagaatcacttgaacccaggaggcagaggtttctgtgagcggagattgcaccactgcactccggcctgggcaacaaagtggactccatctcaaaaaaaaaaaaaagtaataggcagatcacaagatcaagagattaaaacaatcctggccaacatggtgaaaccctgtctctactaaaaaatacaaaaattagttggccgtggtggcacatacctgtagtcccagctacttgggaggctgaggcagaagaattcgctcgaacccaggaggcggagtttgcagtgagcctagatcgtgccactgcactccagcctggagacagagtgagactctgtctcaaaaaaaaaaaaaagtaataaaagcaataataataaatgtgtatgagcttttagaaacacgatgctcatcatcgcaggttccagggtaggtgctctcagcacaggttctctgacttgctcctcaaagcttccctttgaaatggaactattaatacatttcccaaatctcctgtttattaacgtaaacatccctgcgaagagcactggctaacgcctgttatcccatcactttgggaagctgaggcaggaggattacttgaggccaggagttcaagaacagcctgggcaacattgcaagaccctatctctacaaaaaaaaacaaaaaacaaaaaaaaaaaacagaattatttgggcatggcagtacttgtctgtcatcccagctacctgggaggctgagatgggagcattgcttgcgcctaggattttgaggctgtagtgagctgtgatggtgccattgcactccagcctatgagacagaacaagaccctgtctcaaaaattaaaataaaataaaataagttatatatcccaggcttctgcctgggcccagaaaacctgtctctccagggtggggacttgaaagaattttctttcttttttttttcttttttttttttttttgagacagagtcttgctctgtcatccaggctggagtgcagtggcatgatctcagctcacttcaacttctgcctcccgggttcaagctattcttgtgcctcagcctcccgagtagctgagattataggcgcctgccaccacgcccggaaagcagaatttttaacaaagggtctagggaatttttgttagctgggaaattgggggactcagatgcagagactgtttgacaaaaaaaaaaaaaaaaggaaagtgagacaccacaaagaagaggaggtgacttgcccaaagttactcagccagaaaggagcagggccaggatttggtccagagaggagcaggaactagtccagggtcacggagcaggtttcagatgagggctgagactggcgcccttcactgtcccgagcaggtccgcagtggctcctcgcctcccccattaagccacgaagctctggtggcgccgggggccctcaggttccaccagccgtgggtggggaggcagactatacccctctcagccccaatcccttccccctcacccaagctgccttttctcaaataaccacactggggagggcagggagtcggggtgaccttgaggccagaatacacaatggcccagtccctctctggagccctgccagggagaggaaggaagcctgccctgtttttttccatggactggaatgttgattcaggatggagagcagggaggagggaagggggaggtgggagagagagaaaaaaaaaaaaggaggaaagagaagggagtaggaggagggtggaggagggagaaaaggggaacagggcaaaaagggagaagaaggaggtggaggaggtggaggaggaggagggatggggaggaagaggagaagaaagaggaaggagacagaagaggagcatggaggagggggtgccaaggccagactttgggaaccaaggaatgagccccatcagcttcagcccatcctgacacacagtgtggagaatgcagagtccagagagggcaccccaaatctgcaaggttgcacaggaccagtgcagccaaagggcctcacctgtgcggctgcctcctgcctgtggaggcaggagctccctgagtcctcacagagaccttcagacgcaggtgtcatgttgcatgtttctcagaagaggatactgaggcgcccagaggtaaagccacatttcctggagcatctccccttcggatcggactccagggtccttacaatggtctgcaggcctgcccgcccgtcattcccttcatcatctcctctccttcactcactgcagccacctggcctcctggctattgtttgaacaaatcaagcaactccttcctcggggcctttgcactggctgttcccgctgccaggaatttccttccctcagacacctgcatcactccagtcaggtctctgctcagatgtcacctcctcagaggggtcccctgtacacccaaagttgtctggctttattcttcacagcatttatcacttacacaactaacccaactttacattttatatttcttttttgttttcttttttgagacagtcttgctctgttgcccaggctggagtgcaaccgcacaatcacagctcactgtggcctcgaactcctgggctcaagcaatcctcctgcctcactctcctaagtagctgggactacaagtgctcaccaccatgacctgctaattttatatatatatatatatatatatatatatatatatatatatatatatacacacacacacacacacacatatatatacacatacatatatatatacacacaaacatacatatatatacatacatatatatatatgtgtatatatatatatatatatatatatatatttttttttttttttttttttttccctgagatggagtcttgccctctcgtccaggctactagagtgcagtagtgcaatcttggctcactgcaacctccacctcccatgtccaagtgattctccagcctcagcatcccgagtagctgggattacagtacctgccaccaggcccaactaatgtttgtatttgtgtagagatggggtttcaccatgttggccaggctggtcttgaactctatctagaatatacaatatatcaaacatttcaacacaaaaaaaaaaatctgactttttttttttggagatgtaatctcaatctgtcacccaggctagagtgcagtggcatgatctcagctcactccaacctctgcctcccaggttcaagtgattctcctgcctcagcctcctgagtagttggaactacaggcttgtaccaccacgcccagctaatttttgtatttttagtagagtcggggtttcaccgtgttggccaggctggtttcaaattcctgacctcaagtgatcgacccgcatcggcctcccgaagtgctgggattataggtgtgagccatcacgactggccattttttgtctttttgatgacatcttgctctgtcatccaggctgagtgcagtggcgcaactatagctcactgcagcctccaattcctgggttcaagcaatcctcccacatcagcctcccaagtgagtagctgggaccaccactgtgcaccaccacacctggctgtttttaactttttgtgcagacagggtctcgctgtattgctcaggctggtctcgaactcctggcttcaagcaaccctcctacctctgcttcctaaagtgccaggattataggtgtaagccaccatggctggccaacaatataattttttaaacaggcaaattatcttaacagacatttctcaaaagaagacatacaatggccaacaagtatatgaaaaaatactcaacatcatactcattggggaaatgcaaatcaaaacaacaatgaggtattatttcacctgagttaggatggctgtcatcaaaaagacaaaaaatggccagttgtgatggctcacgcctgtaatcttagcacttcgggaggccgatgtgggcggatcacttgaggtcaggaattcgaaaccagcctggccaacatggtgaaacttcaactctatttttgtaaaaatacaaaaattagccaggcattgtggtgcaagcctgtaatcccagctactcaggagcctgaggcaggagaatcacttgaacccaggaggcagaggttgtggtgagctgagatggcgccattgcgctccagcctgagcaacagagagaggttccctctcaaaaaaaaaaaaaaagaaagaaaaaaaaaaaggagcagggattcagcttttgagggccatggcgaggattttggccatcaccccaagtgaagtaggagccacagaggctggatgggttctgattcagtttcttttttttttttagatggagacttgctctgtcgcccaggctgcagtgcagtggcgcaatctcggctcactacaacccccgcctcctgggttcaagtgattctcctgcctcagccttcccagtagctgggattataggcatgtgccaactcacccagctaattttgttgttgttttgttttgttttgttttttgagacagagtttcactcttgtctcccaggctgaagtgcaatggtgcccactcagctcactgtaacctctgcctccggggttcaagtgattctcctacctcagcctcctgagtagctgggattacaggcatgcactaccacgccaagctaatttttgtatttttagtagagacggggttttgccatgttggccaggctggtcttgaactcctgacctcaggtgatccacctgcctcagcctcccaaagtgctaggattgcaggtgtgagccatcatgcccggccctgattcaggttctaacaggatccctctggccatgaggtggaaagagactgttgggggcagaattgtaaagcgagggacaagaagagtcaggggtctccaagctttgagcctgagccactgcaaggatgaagctgccatttctgaggccagaaggctgcaggcagggctgggttggagattggaatgaagataggtcttgtttgaggccaatgaggagggagcctcacccgaggcacacaggctccaggcgggaagttggcgacaagttgtggactgtggttttcacccacctcatggggccccctcatcctctcccccaacttcccctcacgccgtggtggagccagctttgtttgtttcccccccatcatccgtttcatgatggggaagactggttttcccctaacccaacagacacctcttccctcagcctgtccctgaccctcccacctcgggaagccccgagcgggcctcccagaatgtcccggcaggaaggggctgctgctaccgttcatccagccagatgaaccccaaaaggggaagtgggtcacccgtagtcacccggctcatggtcagctcgggacttcaggatctcgtctcttcactgcacccaccacagccctgggaggttttccatgcacgcttctcattctccccacatttcacacgagaaaacaggggctccaagagaggcccacactcacctaaggagctccaaagataggggcatctggatttgaacccaggtcctagcagatgttgttagctcagaggagaaggcagagagggtgaacagaacccagcctgccctcccagatccagtgggaaggcagacttgtccccaggtaataatagcccagcagtgttcacagcctgggatggaggagcccaggaggctgcaggagctcagagcgcatgcctgacccagcctggggtcaaggagggcttcctggaggaagggacagctcatctgatacctagaggatgagtgggagttactaggtgtaaatagtgcagggagagggaagagtatgtgcaaaagcctagggttgagaggaaacctaggggctccagcaaggcgcagtggctcatgcctgtattcccagcactctgggaggccgaggcgggcggatcatctgaggtcaggagttcaagaccagcctggccaacatggtgaaaccctgtctctattaaaatacaaaaattagccaggcgtggtggcgtgcacccataatcctagctacctggcaggctgaggcacgagaattgcctgaacttgggaggtagagattgcagtgagccaagatcacgccactgcactggcgacgaagtcagattccatccctctctctcaaaaaaaaaaaaagctggggggagcctaggggcttctaaatccgatcgtgtcctggccctgattaaactctcctacagctgccctggcaaactctttagcttggcattcattcattcattcattcattcactcattcattccataaacattccctggagtgcattgtcagtgtcaggccccaggggaacacagcagtgaccacgacagccccaccagaccatgaccctgaccagggggctcacgagggcggagacatctactccaagacctgaaggaggagtaggagagatgctggggaagaggcagggaagggtgttcctggcagagggaacagcctgtgcgaaggcctgaaggtaagttttgcatatgacacctttgagaaactacttattgttcaactgaagcatagggttgttcagaagaagccagccttgtggccgggtgtggacttcctcccagggcaccagggagccactgcagagttgtgagcaagggacagacagaggtaggcttgtacttccaagagactcccccagctgccacatgcagggtgaatggaatgatgcacagaatccagtttcaggggtagtttggtacttggacccaggtcccagggagagagtccaaggagcccttctctggtcttccaaggagctgctctccccaagctccggatggaaggcgtgcccatggcaaccgctaggtggtgcccgtacaccaccagccaggtctttttttgccaaaagtagatcaggcccagagctgggcagaactgcccctgggtcaggagagcaaatcgtctctgtcttttggtcctggctccctggccaggcatcctggggccatttgactcccaggctcaggaaggagctggctgagctgcagtgagtatgttcttcgtctctttcctcaccttggaatctcagacgggagcaccctggctcccacttcagacaggaagattcttacctccctcatcagactagcaggctctttgtctccccaccagtttgaggggctccccatttctatcattcatttggaagctcatcagctctcccagaaggcatgggagcccttcaacacccccatcagactaggactacccatctcccccatcaaattagaactgcattgtctcacacatcaaagtatcactcctggccaggtgcagtggctcccgcctgtaatccaagcactttgggaggccgaggcaggaggatcacctgaggtcagaaattcaagacaaacctggccaacacggtgaaacccggtctctactaaaaataacaaattagccaggcgtggtggtgtgcgtctgtaatcccagctactcaggaggctgaggcag[138 bp omitted]ctcccctggcagactggaaatatagactggacactcgttcttgctgcacaggactggagcttcttatcttcttcattggatttggacagtcctgtctccctcatgggatttggtgagagctccttagtttccttatttttcccactgtgttgggccaccttgtccccaccatcagattggggaacaccttgtctcccagtcagaccagaggggcggactcctctgcccttgcaaaggttcctaggtccttcttacatccataggaggaaccatgcctattttaccaagagggaaactgaggcacagagaaacaaagcaccacttctctgtccagctgcagatgcctccacctccccctccgcccgctcctctgcccctgccctcccccgcccccgcccctgacctgggtaactcccctggcaccgggagtaggggaattttgccctgctggcctctgcaccaaccacctccccttatcggcagcgtcgccaccagtggcggcccagggttaaagtccggagagagctccgggcgcgaagcggatagggagggaggagtggcgcccaacccagaacggggactccccggaggtcgagccctcacgctgctgggaggagaggggatgggcagggccgtgtcccatggtaaggtgtgggttcaatccttcctttctagttcccggctgtgtggtcttgaacctggaacttcaccccaactgggagcctcagcttctccagctttaaggagtcaggggcgtgaaaatgtccaagctctggagtcagactccaggagtttgaatgctggctcctataacctgctgtgtgagatctggggccagcgagtgtgtctctctcagcctcagtttccccagctgtgcaatgaggatacctagtgggtggtggtgaacgctccatgagtttacgcacaagaaaaccttgggacagtggctgatagtggcgccagcaagccagcatgcaccccaccctttccttccaagaaaattgcctcctaaatctatgattggtaaccttcacccctccctctttgacccacctcctaacccaggccacctggtgtcttgctgcacagctggtctccctgcccgcaccacacccagaggcgtccttggaaacccaaccctgacccctggtcagaatctgccatggctccccagtgcccccaggagaaagccaagtgctgtgccacagccacagcctgaccactcactgcttgtatttttttttctttttctttcttttcttttctttttctttttttttttttttttttaagacagggtcttgctctggccccaggctggaatgcagtggtgccatcatagctcactgcagcctcaacctcctgggctcaagcaatcctcccacctcagtctcctgagtagctgagactacaggcacatgccaccacacctgggtaaatttttaaattttttttttagcgatagggtctcactcattgcccaggctggtcttaaactcctgggctcaagcgatcctcccgcctcagcctcccaaaatgcttggactacaggtatgcaccaccgcgcccagcctcctttctggttttctaataaagccttttgttcacctccttcaaacacttccccatgctcttcaggtctcagctcaaacaggccaggcccggtcccctgggtcctctctgtcctccgtctcctggttccctgtacctctccaaaagcccccacgaccaaaagaagtaaagatgtagggccgggcgcggtggcctacacctgtatttcccagcactctgggaggctgaggtaagtggatcacctgaggtcacgagaaccgattgaaccccagaggcagaggttgcagtgagccgagattgcgccactgtactccagcctgggcgacacagagagactcaacctcaaaaaaaaaaaaaaaaaatggtggctgggcaaggtggcttatgcctgtaatcccagcactctgagaggccaaggcaggcagatcacttgagcccaggagttcgagaccagcctgggcaacatggtgaaaacccgtctctacaaaaaatacaaaacttagctgggtgtggtggcatgcgcctgtaatcccagctactcaggaggctgaggcatgagaatcgcttgaatccgggaggtggaggctgcagtgagccaagatcatgcgactgcactccagcctgggtgacagtgcaagactctgtctcaaaaaaaaaaaaaagttcccactctggtccagccaccatcactgaaggcccggaccatgcagtcacctcctcatgggactccctgcctgggtccttgctgcacctccacaaggacctgtctttcccccacatgcagccacagggatcctgttaacacctaagtcatcagaaggctgaggcgggaggatcgcttgagcccaggaggtcgaggctatagtaagccaagatggcaccactgtactccagcctgggcaacacagtgagaccctgtctctaaacagtaataataataacaaattaaattaaattaaaacctggcctgggcatggtggctcatgcctgtaattccagcactttgggaggccgaggcagatagagtacctgaggtcaggagttggccaacatggtacctgaccaacgtggtgaaaccctgtctctattttaaaaatataaaaattagctgggcctggtggcacatgcctgtaattccagctactcaggaggctgaggcaggagaatcgcttgaacctgggaggcggaggttgcagtgagcccagatggcatcactacactccagcctgggcgacagagcgagactccatctcgaaaaaaaataaaaaatgaagtcagattatccctcccctgcccagaaccctccatggctcccatctccctctgagtaaaagcctatgtccctacagtggctcataagatcctgagccatctccttgccacccttcccctctccccatcctcccactctcccccagctcatcctgctccagctacactggcctccaacagctgttccgacccacctctgggccttggcacttgctgttccctctgcctagaatactcttcccccagatgtccacatggttcattccctcccctcactcaagtcttagccccaaacgtcattccttggagggcctcccttggccaccagatttaaacaacagcttccacttcctatgctccatctccctcattccctcaccagttttatttttctccatagcaaatacataccattggctgtattttccttgtcttgttgactgtctcctggatggatggacgagtctgtggctccccaagggcaggaatcttagttgttcaacaccagggcagggcctggaaaacctgttagcagagtgaatgaattgtgtgtgtgttttgaaaaggtaaggtgttcacaagttccaaaattcaaaaaggaccaaatggcagtgagctgtcacttccccaccacgactctgcccctccctccccagtcctgttctcacctcccagtttccgtttttttgttttgttttgttttgagacagggtctcactctgtcacccaggctggagtacagtggtgccagcatagctcactgctgcttccacatcctggactcaaatgatcctcccacctcagccgccctagtagctggggccataagcacgcaccaccatgcccagctaatttttgtatttttggtagagacggggttttaccacgttgcccaggctgatctcgaactcctgggctcaagtgatccatccaccttgcccttgcaaagtgctgggattacaggcgggggccgctttgcaaatggtgcacagtcttgctgtggcctgcattttcccctagcaatacagcaatacatctggaaaatcacaccgcatcagcaccttcttttttttttttttttttttaataattgcatgcacagtgtcgacttgtggacagacgagagctcttgccgcaattgttattatatttcaggagtggtgtggcgtggtgcctaagacctcagtgtcatctctcagacccggattcacctcgtagctctacagccagaactcccacaggctgctggtgggcgtgcaagccccgagcagccactttggaaaatggtttgccaacttcccgcaaggttaaatacacacttcccataggatccaacaattttattcctcggtattgacccgagagaaatgaaaacctattttcacacaaaaaaactgtatgcacacacactcacagcagctctgttcataattgccaacaactgtaaacaacccaaatgtccttcagcttgtatgtggataagcgagctgtggtccatccacacaatggaatatcactcagcagtgaagactaactgctattgatacacacaacgtggatggacctcaactgtgttat[137 bp omitted]atggtgagaccccatctctataaaaatattgatgatgatggtgatgatgatgatgatgataatgataataactacattactccatttacaagacactctgaaaaaggcaaaactagagggacagaaaacagacctgtggttgccaggggtggggtgggggatgggcgtgaccccaaaagggcagatgaagggttttaggggtggtgggacatatccatattttgattctggtggtgactacacagccacatgagcctgtcaaagctttaagaactgcatgccccacaggcacttcgagaggccaaagcaagaggccaggagttgaagaccagcctgggcaacatagtgagaccccatctctaccataaatacaaaaattagctgggcttggtggcgtgcacttgtagttccagctaatgaggaagctgaggcgggacgatcgctagagcctgaaaggttgaggctgcagtgagtggtgatcgcaccgctgcactccagcctgggtgacagagtgagaacattcctcaaaaaaaaaaagaaagaaagaaagaaagaaaagaaatgtatgatgaaaagagtgaattttactgtaggtaaatttgtcaatgatttttttttaaggactacatactctgtaatcccatttacatgtcatcctggaaaagcaaatttatagggataaaaagcagctgggtgtggcggctcacacctgtaatcccagtactttgggaggctgaggcaggtggatcacttgaggtcaggagtttgagaccagcctgggcaacatggtgaaaccccacctctactaaaaatacaaaaattagccgggcgtggtggcaggcacctgtaataccagctactcaggaggccaaggcaggagaatcgctggaacccgggaggtggaggttgcagtaagccgagatcgtgccactgcactccagcctgggtgacagagcaagaccccatctcaaaaaaaaaaaaaaaaggcagatatagctgagtgtggtggctcatgcctgtaatcccagaactttgggaggctgaggtgggtggatcacttgaggtcaggaattcaagaccagcctggccaacatggtgaaacctcgtctctactaaaaatacaaaaattagccggacatggtggtgcctgcctgtaatcccagctactggggaggctgaggcagaagaatcacttgaacccgggaggcagaggctgcagcaagcagagatcgcgcccctgcactccagcctgggtgacagagcaaaatgtctcaaa[148 bp omitted]cccgtctctactaaaaattcaaaaattagccaggcatggtggcgggcgcctgtagtcccagctactagggaggctgaggcaggagaatcacttgaaccagggaggcagaggttgcagtgagccgagaccgtgccactgcactccagcctggcaatagagtgagactccatctcaaaaaaaaaaaaagaaaagaaaaagcagattagtggctgccagtgtctggggacaaggggaggagatgactgcaaggagggcacagtggaccttttccgggcactagaaatgttctatatcttgatcaggatatgattaaatgattgtacatgtttatcagaactcatctagcatactccttctttaatttaattttaattaatttaattgatttatttttgagagagtctcgctctgtcacccaggcaggagttcggtggcaagatcacagctcactgcaatctccacctcctggattcaagtgcctcagcctcccaagtagctgggattataggcatgcgccaccatgccccgccaaacacacacatttgaaacaggtgtattttattgcatgtaaattatacctcagtacagttgatttttaaaatctaaactcctggccaggtgcagtggttcaggactgtaatcccagcactttgggaggctgaggcaggaggatcactggagcccgggagttcaagaccagtctgggcttcctggcaagaccctgtctctacaaaaaaaaaaaaaaaaaaatgcaaaaactagcagggcatggtggcacatgcttgtagtcccagctactcaggaggctgagggggaaggatcacctgagccccgggaggtggaggctgcagtgagtcgtgaatgcaccactgcactccagcctgggtgacagagtgagaccccgtctcaaaacacacacacacacacacacacacacacacatttagctcctcttcccccttattggctgtgtgaccttagacaaagctcctaacttctctgtgcctgggtaaatgatgagggagttgggaaggagggaatgatcactgagggcaggtgctgaggtctcaggtctcactgtggattcatgcaagaaacgtttacaagtgaaacagaggggctttatgagcttttagaggggaactggagacagagacctgagcagctgacaatggctcctatgtctccggagggcaggtggtgggctgagcactgtcagggcctcacctgcatccctttgaaccatcgggcactcctttgctgacctggaaaagtgagtggagccatccctgggatcccagagaaatggcatcgagggcacacaattaagagcattgtaagcaagccttgtgaacagtcagatgggcttgacagccccgtgcccagaggtctctgctgtttggggcagtgctggatacacacagcagtgacagccccaggcctgccctcacaggctcacacatggggaagactagcctgtccccagacagtcgcatcccagaatgttggggctggcatggtcaggggggcccagagggggctcctgactcagactagaaagagaaatcagggagggcttcctggaggaaaggctgtcagagctggggcctgatgtgtttattgagcacttactgtgtgacctggtttggatctccaagaaagaggtatagttttgacgttgaagtgaaaggggtatgtatggaaggaggatggtgcgagagaggccttggctaagaggcagaaaggggtgtgggtgggacagagccgggggataaggctgaaggaagacggtagctggtgtgggtcctctgcggcaggatcctggactttctcccgatgatggggctcaggaaggagcagcttcctcaggttccatcctgtgcaaagggaggaccaggcaggaggaggtggggaggctgaggaaaggccatggaaatgagaagtggctataagagccacccaggggaggggacacagggagggtgagaagacctgggcgcccgctcctttctcttctctgttctcactctgagctagacggcattggccgggcagcttccttgtttctaaaagtttaagataaagggcaggcaaggtggtgcctgcctgtagtcccagtgctttgggaggcccaggcaggtggatcacttgagcctcctgtttggagctgtagtgagctatgatcacatcactgcactccagcctgggtgacagagcaagaccccatatctaaaaataataataataattaataataaatataaatttaagatagtgaatctggccgtgcgtagtgactcatgcctgtaatcccagcactttgggaggctaaggtggacggatcacctgaggtcaggagttcaagaacagcctggccaacaggacgaaaccctgtctctattaaaaaacacaaaaaaattagctagcgtgcacctgtagtcccagctactcgggaggctgaggcatgagaatcgcttgcacctgggggacagaggttggcataagccaagaccgcaccactacactccagcctgggtgacagagtgagactccatctcaataaaaataaataaataaataaataaataaataaataaatagtgaatcttaagtttgccaaggatgcatttttatctctctttagttcttaagactctgatcattcttctttttttttcaagttccagggtatatgtgcaggatgtgcaggtttgttacatagtaaaaatgtgccacggtggtttgctgcacccatcaacccatcgcctaggtatgaagcccgtcatgcattagctattcttcctaatgctctccctccctctgcacccctccccatcccaacaggcctcagtttgtgttgttccccttcctgtgtccatgtgttctcatcattcagctcccacttataagtgagaacacgtggtgtttggttttctgttcctgcgttagtttgctgaggataaatggcttccagctccatctgtatccctgcaaagcacatgatcttattccttttcatggctgcatagtattccacggtgtatacataccacatttttctttatccaagacttcgatcattcttaatttttatttttattttatttatttatttatttatttttgagacagagttttgctcttgttgccaaggctggagtgcaatggtgcaatctcagcccaatgcaacttcctcctcctgggttcaagtgattctcctgcctcagcctcccgagtagctgggatgacagccatgcaccaccatgccgagctaattttgtatttttagtagagatggaatttctccatgttggtcaggctggtcttgaactcctgacctcaggtgatccgcccaccttggcctcccaaagtgctgggattataggtgtgagccaccgtgcctggcctaatttcttaaattctacccatttttgctcctaaagttctgtaactgcaggtttacttgatcctttgatactaagattcattcattcagtaaatacttactgggcctctattctgccctaggtcctaatgatacaagggagaacaaaatgtataaaatttttgccatgacagaaatcacatttactgagcactcactgtgtgccaagtttcatgccaggtgtacacatataacattacctacatgatgagttacagacttctattatccccattatccaaatggggaaactgaggcatagggttctggaatcccttgttcctaaaaatctaggattctagaattcctctccttctccttcctcttcctcttcctccctcctcctcctcctcttctccttctccttccccttccccttccccttccccttccccttccccttctccttctccttcttctttttgagacagggtctcactgtgttgcccaggctggagtgcagcggcatgatcatagctcactacagcctcaatctcccaagctcaagaaattctcccacctcggtctcttaagtagctgggaccacaggcagggtctcactttgttgtccaggctggtcccaaattcctgggctcaagtgatcctcctgtttcagcctcccaaagtgctaggattacaggcatgagccaccgtgcccagcctagaattctttgcacctaagattgtaagggtctataattctttgtccttaagattctcttatgcttggattcaagtgaacaatgtatataggaaaaggtgctgaatctcattattgatccaggaaatgcaaattagaaccaccctgagattccaatccacacatacacacagcaggatgactcatatttttaaatctggtagatccagtactgataaagatgtggggcaaggagaactcacagcggacattgaagatgggagtgagaattggcataaccacgtgggaaaagtgtctggccatgtcttctacaggggacaccctgcagcctaacaattctagtcctggagaatgcagaaaaatgcacgctcatgagcatgagcagtattggccaaaacagtcagaaagtggaaaccaaccttctgcccaccaacaaataatagattcaaaaattgtgctatacagccgagcgcagtggctcaagcctgtaatcccaaaactttgggaggttgaggcaggtggatcacttgaggtcaggagttcaggaccagcctggccaacatggtgaaaccccatctctactaaaaatacaaaaattagctgggcgtggtggcacatgcctgtaatcccagctactctggaggctgaggcaagagactcgcttgaacccagaaggcagagattgcagtgagccaggatcatgccactgcactctagcctaggtgacagagcaagactcagtctcaaaaaaaataaaataaaataaattgtgctatatccatgcaagagaatagtatacagcaatgaaaaaataaacacactccaatagattcaaggatatgaatgaaaagccaggcaaggtggctcacacctgtaatcccagcactttgggaggctaaggggtatggatcacctgaggacaggagtttgagaccagcctggccaacatggtgaaaccccatctctactaaaaatacaaaattagccaggtgtggtggtgcacacttgtaaccgtactcaggaggctgaggcaggaaaatcacttgaactcagaaggcagaggttgcagtgagccaagattgcgccgttgcattccagcccgggcaaaaagatcgaaactttaaactttagctcaaaaaaaaaaaaaaaaagaaaaaacagaaaagaatatgaatgaaattcacagacataaaattgagtcaaagaagccagatccaagaggttgtacaataagattccctttaggacaggcatggtggctcacgcccgtaatcccaacactttgagaggctgagccaggcggatcacctgaggtcaggagttcgagaccagcctgaccaacatggtgaaaccccgtctctgctaaaaatacaaaattagccgggcgtggtggcgcatgcctgtagtcccagctactcaggaggttgaggcaggaaaatcgcttgaacccaggaggcggaggttgcagtgagccgagatcgcaccattgcaccccagcctgggcgacaataggaaaactctgtctcaaaaaaaaaaaaattagctaagcatggtagcaatgcacctggggtcccagctagtcgggaggctgaggccagaagattggctgaggccaggagttcaaggctccagagagctatggtcacacccactgcactccagcctggatgacaaagcgagaccccatctaaaaaaaaaaaaagatttcctttattaaaaattcaaaatcgtagtagtcgtaggtagcaaaaatataaagaaaagcaagaaaattataccataaaagacaaaatacaggtcacctttccaggagggagggagctgtgaggcatgaagaggcatgaaggagcttctgaggaactagcaacactatttctctttttttctctttttttttttttgagacagagtcttactctgtcacccaggctcgcgtgcattggcgcaatagcaatattgctcactgcaacctccgcctcctcggttcagctattctcccagcctccagagtgtctgggaccacaaggcgtgcaccaccatgccccactaatttttgtatttttagtagagatggggttttgccatgttgcccaggctgctctcgaactcctaacctcaggtgatccgccccctcggccttccagtgctaggattacaggcatgagccaccgcgcctggcccagcaacactttcttaacctaactgtttcctttacaaaagtctctgaaacagaacaatatattttaattgtacgcaattctccccatgttatatttcataattttcagggatttttttttaatcccacgattccaaatctctgttcctcaaatgacgtggctctccagggggcggtgggcaaaagttctgagccctggcatggagccctggcacagagacctggtgcacggtgcaccaggaacccacaggagaatttgggatctgaaacagcaaatacaatttgattttcccagaagtgagcaaatgtgctgtgactctgtgtgaccacagtgggctgaagtgacaagttcaagggtaggtgatgttcagagtagaggccacaagccagcgcctccccgcccccaccccacctcctgcagagcgtgacgccagtaagagtggtcatctatttctcttcccaccagccaccccagagcctggctctccctgggaggagatgcaacctcaacaatcctgggccagtcccattctttttggatgtggaaattgagcctgcccaggattgcttggctgagaggctgccgtgttgggatttgctcctgacttgcaaccacctgactccacagggatgaggcagtagagacagccctgccccatcctcagtatcctgggaatgtgttggagggtatgggtggccccgactgggacactgggatgacggttggaaacaagggaggtgagtgtgccatgtcccggctcaaatgaggaagggcccagtgtgacctcggctttcccaggagcctgagggacttttgcatctgtatttttaaatgctggtggccacagggcaggttgtggccttgagtaggggaggcaccgacttccagggaaaaggctggagtttcaggaaagggactgtccctcctggataggcaccatgctccaccctgccagggtgggcttgagaagaggggcttctaattcaatgggagggctcctacttagggagtggctaggctgataggggtggcatgatttcccccaactcaagtcaagaaggaaccactaatctgatggaggaggcacataccagctccctcctggggaaatttatatttcctagtctaatttgatggacaaaacttaattttactcggacagcactcctagtcccaagaaggattcaagatttacagcgtagtgagctctagtctgatggaggaggcaggacccaaacccacccacagggaggtttcctatgagggtggaggcatgcctgttatcttcaggaagctctagtctagtctgacattcatccaaatgtcttctggggaggaggggcaaaattgctcccctcaattgagaatctagacagaggagggagtcatgctgccccaccccatttttttttccttttagatctagtcctgaacccagatgccccatgcatcttcacggaaccgatgggagaagcaaaatccacttttagagatatctaatctgtgaagaagtcacactttcattctcagggagattctgatctgatggaggaggaagaatgcaattcaaaccctcaaggaactcttacactgatgggaaacatgtccccaccttgggggcctccaagtctgatggcagaggtcttcctcccatccttgggaagctctagtccaatgagggaggcactcccccaccatgtcagtgccttccttcccgtaccttctccctgccctctggctgcccgaatgagcagggcagggggcttcccctccccacctccctggtgaatcctagaatcagggaacttctgcaggaggacaccacggttccccagccctgggacttccctttctccgtcagcccaaacccagggcctcactgggggggccagacatgcctgccctgctgatcatggctcacctatcaccccagcccccatgacatcacctggttattgcatgtccacagcatcccaggctccgcggggactttccatgcttgacctcgccagtgccctaccctgagagggaggagtctgtccccactttacaaacaaagcttagagggcatggcactcttgccagagaccacacagccagaaactggcagagtggggaacagaccaagtgggtctgactccagagccccagctccttaggaatgaggatgaggatgatgtacgtatacagtcctcattttctgccaggcaatcctgccaagggctatattgctgactcactagctcttctcggccatggtgttattattctcattgtcattattctgtaactcagacagggaaactgaggcccaaagagatagatgagtatgtagcagagccaatactcagtcaggttgtctgactccagtgccatcatcacagctcagctcccccagaagacagatgattatacggaattgggcatgcgaaagatttatggaccagcctgggaaacgt[142 bp omitted]catcgagaaaccccgtctctactaaaaatacaaaattagccaggcgtggtggcacatgcctgtaatcccagctactcgggaggctgaggcaggagaatcgcttgaacccaggaagcagaggttgcggtgagctgagatcccgccattgcactccagcctgggcaacaagagcgaaactccgtctcaaaaaacaaaaagaaaaagaaattagccaggcatgatgacacacacttatagtcccagctactcaggaggccgaggtgggaggatcacgcctgtggtcctagctactcaggaggctgaggtgggagaatcgcttgagcccaggaggctaagactgcaatgagctatgatcgcaccactgcacctcagcctcagcctgggcaacagagtgagaccctgtctcttacatacatatatatctcttaaatacacacacacacacacacacacacacacatatcttaaatatatatatgtgtgtatatatatacatacgtgtgtgtgtatatatatacacacacatatacatatatatacacatatatacgtatatgtgtgtgtatatatatgtgtgtgtgtatatatatgtgtgtgtgtgttgtgtgtgtgtgtatctatctatatatatatatatgcagggcacagcacctcagaaaggaaaggaggaagcaagaggagtgagcaagggggactgtcaagttgtaatgccccccctacaggaaggctcttgcattagagaagtcccaccctggtcagaaatggctagcacctctgaaccccacctgtcattggctggagactgcccaggagaccatgccccagccggtaagctgaagcagacctcaaaggagtcaactgccaatgtcagaggctgtctgctctctctgcatgcctggcagcaagatcaaaagtccgttttttttgtttgttttgttttgtttttttaaatttctgagacagggtctcactctgttacccagggtggagtgcagtggcatgatcatagctcactgcagcctcagccccccaggctcaggcaatcctcccgcctcagcctcccaagtagctgggaccacaggctcaccaccaccatgccaggctaatttttatatttttttgtagaggccaggcatggtggcttatgcctgtaataccagcactttggggggctgaggcaggaggatcacttaaggtcaggagtttgagaccagcctggccaacatggcgaaaccccatctctactaaaaatacaaaaattatccaggattggtggcatatgcctgtagtcccagccacttgggaggctgaggcaggagaaccacttgaacccaggaggcaggggttgctgcaccactgcactccagcctgggtaacaaagtgaaactttgtctcaaaaaaaaaaaatttgctgggcatggtagtatgtgcctgtagtcccagctacttgggaggctgagccaggagaatctcttgagtctgggaggcggaggttgcagtgagccgagatcacaccactgcactccagcctgggcaacagaacaagactctgtctcaaaaaaaaaaaaaatgtacttttttgtagagacggggtcttgttctgttgcccaggctggtctcgaactcctgggcccaggtgattctcccatcctggcctcccaaagcactgggattagagggatgtgccgccacacccagccaacaggttttttcttgaagggggatgtgagctgcctgtctctgtggctgccactcccatacctatatgaataataacaatcattttaaaataatatcttccatttactgagactttcctctgtgccaggcctgtgctgacgtgtgtgaattcatttgactctcacaacaccgccggaagacatgcactgtttttaccctcattttatagatgaggaaactggggctcagagagggtaaataaatcacctgcccagggtcacacagctggtaagtgacagaactgggattggaacccaaacaattagacagggccccattcacagatgaggacactagcccactagtacctgattgtctactgtcacctcgctgagaccactgtgaccttccttcctatgccccgccttcccagacccccatccacccacccagggcagatgctgatctccacactccccccaccgaatcacccctctctgatcaaggcagctggcaggggcggcggagagggtggggggacgagggtgtccagtctccctggcctgccaagagaggatgtcgcaatcctctgactcagcgtcgtgcgtgcagacccagcaagaggcagaaaggggaagattaagtcttggcttaggccccagatgggctgattctgctcaatgccaggagctcccagagctgccaaggctccagggtggggaggaaccaggaggtgcaggccatgctccaggaagctggcccgcattcacccgtgggggtggggcagagcagcctcagggagcggagccgtgtggacttccagcccagggcccagactggaggcagcctgaccttgggcatgtcccttcccatccaggcccagagtctctgtatccttctgtctgcggaattcacttgctctccctgaacctctctggaggctctagtggttgttcctcctcaagggactcttaagtctaactctatttttttttcttttttgtttgagacagggtcttgctctgccacccaggctggagcgcagtggcacgatctcagcccactgcaacctcggcctcctgggttcaagcgattctcctgcctcagcctcccgtgtagctggcattacaggcgcccaccaccacgcccggctaagttttgtatttttagtagagacggggtttcgccttgttggccaggctggtcttgaattcctgacctcagatgaccctccagtctcagcctctcaaagtgctgggattacaggcgtgagtcaccatgcccggccccttaagtctaactctattccctcctgctgcaatgccatcctctctccacgcacggaccctccccataccaggaggcagcagagaagagttccagggtgcgaatctccatgggtgtcctcggacatatgactttccctctccatgcctcagtttccccatctaaaccatttcttcccagggagaaggggcctagaatcaagctggaagggcacacctgcagtctccgagactcatggccacttctcccaggtcagaagcgtgctggggtcacagggacctggcttgaaatctcagctctccccagttcctcaccgtgtgacccgggcagtgagttcacttctctgtgcctgtttcctcctctataaaattgggtttttagctgaattttccttacaaggtgttaagaggattaagtgggccaattcttagttgcaactcagcccggagtgaatgtttctgtcttgtctcctctgtgagtagaaaagggtgagaaggaggccctggtctgctggatagggtaagggttaaggccagcagcgtggagacagaaatgaacattattcattcatttattccacacacttttcttatttaatctgctcagtaagcctgtgaaacaggatctgttatcatcctgttattattattattaccattattttgagacagagtctcactctgtcacccaggctggagttcagtggcatgatcatagctcactgcagccttacacctaaagcaatcctcccaccttaccctcccaagtagctaggactacaggtgcctcctga[132 bp omitted]aacctcgtctctactaaaaatacaaaaattagctgggcatggtggcacgggcctgtagtcccagctactcaggaagctaaggcagaagaatcgcttgaacccaggaggtggaggttgcagtgagccgagattgcgccattgcactccagctgggtcaacaagacggaaactctgtctcaaaaaaaaaaaaatctgtagagacagggtgtccccttgttgcccagactggtcttgaactcctggtttcaagggattcttccttctaccttggcctcccaaagtgctgggactacaggagcacactccatgcccggccccattcgccactattaaagtcacaaggggctgggcatggtggtttatacctgtaatctcagcattttgggaggccaaggcaggtggatcacttgaggtcaggaggttgagaacagcttggccaacatggtgaaacccagtctccactaaacatacaaaaattagccgggcatggtggcggacgcctgtaatcccagctacttgggaagctgaggcaggagaattgcttgaaccagggattggagattgcagtgagccgagatcatggcactgcactccagcctgagcgacagagcgagactccatctcaaaaaataaaaattaaaaaataataaagtcacaaggaaggcacagagagggaaagccacctgcctaaggtcacataactagcacatggacgagccagggctcaaaactatgtctctaagcccagcatgttgaattctattttccccaatgaagcaggtcctgctattgaaaacacaggatatttgatgaggacaataataatatataatgttatattattattattattattattattattattattattataaaactaatagcagctaaattgcatcaagagccttctatacatcagaccccatgggacagagtcatattttcttgatgtgatccactctacagatgaggaagctgaggctccacgaggttaagtaactgcccggaagtcacaaagctaacgatcaggagacag[138 bp omitted]aacacagtgagaccccctgagtctacaaattgttttttttattagccagtcattgcggcacatgcctgtagtcccacctacttgggaggttgaggcaggaggatcatttgagtccaggagttcaaggctacagtgagctatgatctcaccactgcacttcagcctgggagacagagccagatcttgtctcaaaaaaaaagcaggacaagacccagtaattgagccagatgggaacttaggccctgaccagccctactctctcctcttagaaagggaaattgaggcccctgagagcaagaaagctgcctcaagcctacagacttccagatggaatttcgtttccctctcaggactttgagcaggtaaattcctggcctttcctcccccaggatgggttggggaaaaagaaacagcagctggggaggagatctgaacaggtacaaagggcggcctgcatgaggggaaagtggttagacaccaagcagaacttcctggcctcctctgggaagtttctaagactcatccaggggctgcccctgcgggtgggggccctccagaggccaaggcccagagaaaggagaccctagtcctttccgcctggggtgcaaggagccgggggagggtgggggtggccatcctggttccgcatcctccgttcccgacattggagggaggctgctgtgggagctgggactttcctgagagcagaagattctgggaaattagagacagctgcagggcggggctgcctcccagcctcccttcccttccctccccttggtccctgctggctccggaggcacgcctctccacccctccaccccaccagctcctcctcccctagtccatgccttccaccctcggaccctcagatcttttcccctgagcctctttcttctccctcagatctggcctctaccctcagactctctccaaatcttctttcctcagacccttctttcccctccaactctctcctcctccctcagagctgcgtcccctcacttagtgcttctcagacttcctcagactgtgccctctccctcagatactctcccctcccctcagaccctcacctcctcactcagaccctcacttcctccttcagaccctcacctcctccctcagacccttacctcctccttcaaaccctcacctattctctcaaaccctcacctccttcctcagatgcttatctcctccttcagaccctcacctcctccctcagacccccacctcctccttcagagcctcacctcctctcagaccctcacctcctccctccaaacctcacctccaccttcagacccttacctcctcctttagaccctcacctcctctctcaaaccctcacctccttcctcacatgcttatctcctccttcagactctcacctcctccctcagacccccacctccttcagaccctcgtctcctctctcagaccctcacctcctcccttagcccctcatctcctccccccgaacctcacctccaccttcagaccctcacctcctccttcagaccctcacctcctctctcaaaccctcgcctccttcctcagactcttatctcctccttcagacccttgtctcctccctcagaccttcacctcctccctccaaacctcgcctccaccctcagacccttatttcctccatcagacccttacctcctccaacagaccctgtcctcctccttcagatcctctccccctcctcccactaaaccatctacttctctctcagacctatcttccttcttcagatcctcctccttctgacccttttatccctcttccaacctcagagaaccatcagcaccctctcttccagcagcaccgtctctcccagcccttcgaagctcccaccggacccatcacatcttctcccctctacagtcctgctaggttggaaccactgcaccagctgccctgggatgccaggagtgggacaggcttgggtgtccttcccaccctacctctgagggtccccaccctaagcctcgcccctccaaacctcagctttcctttctgtgcattgggatagtgctccacacccctctcctgtgtctgagggtccccaggggtggggttggatgggcagggaacacagcccccagcctgtccaaccgaattcctcccctcttcccttgctgtggcccccacaacaccagcaggcaggggttgccattggtcccattttccagaagaacaaactgagtctcaaggcaggggatggcttgtctgaggtcccaccgggagcaaggggtggaggtggaattaacacaggtctgtgctcgggatgtttcgccatgaagggggataagggagatccagagagaggtcgaaaggaagggaaggggtgaggcctctccacacagccacttctcacatcctgggttaacgatccactcgggtggggcccgagtccggccaaagtcccttcccggggccccaatacccactttcaaggtcccaggggacacagagacagcaacagagatggggagacagagacagagggcggggcaggagacaaccagagggaggtcaggcaagtttcgaagacagaaggagaccgggggagagaaccagagagacgccgcgtgccccctgggcaagtccggggtgcagcccccatgccccgccccctgtgtccccaaagcctccctctccgcctcctgtgactcagtgacccggactcaaccccagcggctgccccgcccccagggaaatccgggaaagccccggaccttcggggccccaccccggggcggggagagggagaggaggggaggagacggggaagagtcccgcctccctcctccctccctcccatctccagcctgagtcatgcccccaacccgcctagcctgttccccacccatcaacccctcctcgaggtgggaggggaagtcggggggaagccaaactgctccccgctcctgcagcaccggcctcggtcgcgctgactctggcctggtgtccgtgtctcttgctatctctctttctctcaagatctctgcgcctgtctccatgtctctttctctctgtgcacctaggattttccgagcacccaccccggtgccccgcgggccccggctgggggcagggcccccaacgagtgcagagacacaatcagtggagcgctccccaccctcaccccacccccagcccctttagacccacagctgatgaggcacgtggagtggcagagatggaagaggggagggagaggaatcgttcctggccgcctgccgagtgccagtccctgccccgggtgcgtctcttcactcccactaaggaggaaacggctcagagaggggaagtgtttggccaaggtcacccagcgagtaagtgggaaccgagattccaaaccccgtcccagagatgccaaggcctcctgagagacagagaagcagacagcaactgagaggcagagagatggtgacagacacaaagagacaaaagagagagacagagacggaacagagcacacagagacaaacgcggggttgcggagagaaacacctactcagacaggagaaccagagagacagttacagactcagagatagagatgttgagagatagggccagaaagacaaaaacagaggcagagagagcggcccttggcagcaggggtggggacacccccccaccccccgaccccgcctcctctccccccacccctcctttcctctccctcccccgccgaggcctggctgccccaggcgccgcgggccgggagggggcaagcggggcgcggcgcgggcggggcgcagggcaggctgcacctcagagcggcgggagcagcggcgggtccaggaaacccctggggcgtacgggtggccccgggggggccgggggcggggaggcgggcggccggcaccgccccggccgacaaaagtcccttcagttcagccggctgcaggggaagtcccggcgcccggcgaaaccaccctcccgtgcagccgagcccagccgctctccggccgccgtccccggcggccccatgccccgatgccccgcgggggccatggacgaggggcccgtggacctgcgcacccggcccaaggccgccggactcccgggcgccgcgctgccgctccgcaagcgcccgctgcgcgcgccctccccggagcccgccgctccccgcggcgctgcgggccttgtcgtccccctggaccctctgcgcggcggctgcgacctgccggcggtccccgggcccccccacggcctggcccggccggaggcgctttactaccccggtgagtggcccccgagggtccgggccgggtgggatccacacagagcatagggtcaccagagccaggaggcagagcttgaggcacaaaccggtgtctctccagggacctgggggacaagaggatataagcccaggttccaaggatatagatatgagatcatcggggagccagtaagctgtgccttgggatctggggatttggggaccctggggggcaaagcccaggggctgagtgacgtgggggggggggggccagggacaatgcccagtggtacaaatatgggggtgtcagggaatcagggcacagagcctggtatcctaggggcaagaaagtacaagctcttaagccagatgtgtagcgttatgaggaagctgagctgggctggagaaactggggttccctgtatcctgatattattagaatcaaagggagtcagggtaacagagactggggttctaaggagacagatactgaggatctcaggatgtcacaatctcaggaaccaagatatctggagacatgggcattatgaaaacagagatggggttctgagcaccccaatatctgggatcacaaggatccaaggaaatgaaccagagctccagggacccagataccagggggtcttgaggacccaggagaacagagacccgggtttctgggtactcagttatgtggggccacaagtgatcagggtcctatttgaggtcaagatcaggtgggcagaagggatcaggggactgaggatcctaagattgggtaattctgagactttgggtaatttagaggcaggatgaaaatttcaggggtctccagacagaaagcctcaaggcctcaaggcctggtattggagatacgaggacctggaaacttgggagttcaagaacagagggcccacaaggatcagcagatgacgaagaccacacactcttctctccatcctatctccatccctgatctcaagaaggggtgtcctctaccacagctgtggccacgtcaccatccccaattgacccccaaagctgcagagagccgttctacagagccccaaaactttaggtagtttctgcaccctccaccccatcagcgtgacagctggagagcctcaagctatgtgcatcaggagttctgccacggcctcccagctttcctattccaagagtgagaaagcaggcctcagttttccccgtctgtgtgatgggttggtatggatttgcctgctgccatggtcccctcgcctttgtttgtttttgtttttgttttttgagacagagttttgttttgctctgtcgcccaggctggagtgcattggcgtgatctcggctcactgcaacctccgcctcccaagttcaggggattcttgtgcctcagcctcccgagtagctgggattacaggcatgcaccaccacacctggctaatttttgtatttttagtagagacagggtttcaccatgttgcccagactggtattgaactcctgacctcaggtgatccgcccgcctcggcctcccaaagtattggtattagaggcatgagccacagcgcccggcctgccgtggcccctttttaaacagtttgatctaaaattacccatgcgtggtggtcagcatctgtaatcccagctacctgggaggttgaggcaggagaatcgcttgaacctgggaggcagaggttgcagtggggcaagatcgtgccactgcactccagtctgggcaacagagcgagactacatctcaaaaacaatttgaacaggcttctggtaacacctcctctctgcctccactctccccaaacccactctacatttatcccacaccctgcacccagcaattcatcagccacaaaatcactctgcagacagtccctggggtcccctgctaggtgatgatgggtgcaccctctgttcttaagggaccctttgtctgattggagattgaggtcagaagataagtgacaatgagggtgaccagccctagagggagaggaagctgccagagcccagaggagggacgtggaagggggtttgttttaggccctgaggaccctgtatgggatgcaaaagggacccaggagaaagggcaggtgacaccacaggagcaaagttttagaagtggggggcgggttgagggtctgtgggtgtggcctcacccatgtcccttctctgtcctccattgtccaggagccttactgcctttgtaccccactcgggccatgggctccccgtttcctctggtgaacctgcctacacccctataccccatgatgtgccccatggaacaccccctttctgctgacatcgccatggccacccgtgcagatgaggacggagacacgtgagtgacagtcccctattaaggggaggggtggttgggaagaccagccgtccataacacagggccactcagctcccagtggacctgagtcagaactcggtctccaccacaggctgtgtgaccttgagtaaggcccttccctgctctgagcctcagtttcctcctctgaagaatgggcaccttgagagcatttacctcctaggccactatttttgtttggtttttgtttttgtttttttgagacagggtctcactctgtcgcccaggctggagtgcagtggcacgatctcagctcactgcaacctctgccccccaagttcaagtgagtctcatgccacagcctcccgagtagctgagactacaggtgcccactgccaagcctggctaatttttgtattttttggtagagacagggtttcaccatgttggccaggttggtctcaaactcctgacctcaagtgatccactcgccttggcctcccaaagtgctgggattacaggcatgagccccaagcccacccctagaacactatttttggaacggtggtctttagatattttgtcacaacctaaaaacaagaaagacagttcattgattaacttactatatgaattatacatgtaaaactatcactggacctggcataaatgttgagtaagtgtttgttaatattactattattttatctcaaacccagcacacacacacacacacacacacacacacacaaacttgaaattaaaattgcacaaaatgaaacaatactcgcccttactatgtgggttctactgtgacattttctttttttctttttttctttttcttttttttttttctgagacagggtctcgatctgtcacccaggctggagtgcagtggtgcaatcatagctcactgcagccttgatctcttgggctcaaatgatcctcccacctcagcctcctgagtagctgggaccacagacgctacccccacacctggctaatttttgtattttttttttgtagaaacacagcagtcttgctatgttgcccagactggtctcaaactcctgggcttaagtgatcctcccacctcagcctcccaaagtgctgagattacagatgtgagccaccgagcccagcttacagctttactttgccattttctattctagtcgacttcattgtttcatggtcacagcccactacattaatttgaagatcccctaaattgatttcacaacccccatggtttatcacctgcagtctgaagaacatgtttgtgaggctgctgagaagtcctgcacgggagggtttggtctgtgcctagcacatagtaagcactcactgcaattgatcatcatgattcttattattctattgacctgggttggaatctcagcgtggccacgttctactccctctgtgcctcagtttccctctctgtaaaaacaggaaccatcgcgtgtgagggtctctgggaggaagaaatgacatgatttatacaaagcacttctgtgagaattagtttggggcctggaaaccacaggtagagatgaacaggcctgtttctgcagagaagtagcagagggctgctccgccactggcccactgagtgatttcatgtccctgagtctcagtttccctatttggaaactgggtctcataatagcacctatcacaattaggattcagtgagatcttgtacacatgtattaatacagtgcacagaacagggctgggcaaacagtaagtgctcaatgcatggaaatgggtaatgtttgagcagagctcccagggtggttgcaggccatctccagagccctagcaggagaaagtggcctagattataaagagctaataaaacctagttccctccccttctgggtacctctggggggtcatctatgaaatgggcttaatcagacagtctctgcccccagtggtgagctgtccatgctgttgaaaagcagggtgcttgccagaggccacccggcccaccagtctccagccccaggccctccccacaccctccctctccgactctcccccaaggcaaacacttctgcctcagctgcctgctgggggaaatcccttcccgcagaacttgaccgcaacccagctgctctgcctcccccacgtcagcacccgtcactcactcgcagcctcccccctcctggcgcttcctccaaccttaaccccttccgctggggctgagactttaccggaacgggcagcggcccggccccagcctgcgccaccggctcctcttcacacccgcgggggagggcagtgggggcgaggagggcgggggacgctaagtctgggtccccgcagaagccaaaaggttgggaggctgggcttccatctcctcacaggcgggtacgagccttggggcatttggacccccaagaggttagggactgggcagccagaaacctggggagggggcaggaaggcgggggcggggggggggggtgatgttctgattctcagaaggcagaagttggggaactgtattccttaatctccgaggggatgaggagcagcttggcagcttggggacctggcactcagaggggctttacgggcaggaccagatacagaaatttgcagagtcccttgttcaaaacttaagaatttcacgacagcggcagcaggacgttgggctggtgaaactggtcacgccaaggggcctgaaagtctgtgttcccaaagggccagggtttgaggcgctgtatttctgggtctctgaggggacaaggactggcaaggtagtttgggatcctggagctctgaaggacgggggaagtccttattcttaaagaagagttagggctatttctggctcccaagagatgttgggggtggatgccgggataaggaggacttgcagccagctggagcctgagctctgcggggtggagttccagagggtcccccaggcgggaggactcgggattatgcgccccccctacacacacacacctcaagggagctaggtcttcttgggctgggcactcccttcccccgccccattcgaggatggaagttggggtgccaggggtggccagggtagatccccggcgggacaggcttccctcccccgggagcaggaagcagagccccgcccagcagacctgttactggaagtccgagggctgggtcgcccctcccgtccccacttcctccagccccgccccaccccctgcggcccgcgcgtttatgggaactcaggcctggacggtttctctgaaatcattcgctgcgtctgccctcacttaaccctggccgccccgagagggacccaggccaggcgtcctgggagatgcagagaaggggggacccttcccagggaccccggcccctccctcaacattttatttttaaatttggctttcacggattaggagtcaggttcagcgattcacctgcgtgatctcaccctggcatgtggacgctgtactttacataagagaaaactgaggctccgaaaggcccccatggctttgccctagcacgcggctacgctaggaggggttgtggcccaatttgcaactctggccccgggatttctgcactccatcagaaccacctgggaggctagtttaaactggattctagagacacattccacaagagaaacgggtgctggtgagaaaggaattacttagtaaactttaaataaagatcctgccacccactgtgtacacgcagtcctccttgggtcctccactctgtcccccaccccatgcaaacagcacaggcgtgcacaagcacgcacgcatgcacacacaccagtctctgaatagctgttctaggttggggtctctggaaactgagcaggaagtttattggaaatgctctccatcaacacctgtgggatgaaggaagcccatctgggcagagggagaagttgagctgctgtgtcgcctccacacggcctcagctgtcccacagggaatattgaagctggaatggccttcagcattggggtcaggaggctaggccttctatgctggcattaaccagtgactggatgccattgaagggcagctgcccttgattcacatggggcgtgaccttggacaagcagctctcttgagttgagggtaattcccaaatggtctgaaagctgacaatcttcccagaagctgagggagtgagtccttcagtctagaagggggttctggactgtaccgcctccagaacaatggccccatccca[137 bp omitted]ggccaacatggtgaaaccatgtctctactaaaaatacaaaagttagctgggcgcgatggcacacatctgtaatcccagctactcaggaggctgaggttggatgatcgcttgaacctgggaggcagagattgcagtgagcacaagatagcaccactgcactccagcctgggcgatagaacaacactccgtctcaaacaaataaaataaaataaaataaaagggtccctctggctgttgtgtgggggacagacagtagagcataggtggaagcagagaagccatgaggatggaactgtactagaccagcagggagccagtggtggctaaagcaggatggagggagcgggtggtaaatcaggatggagggagtgggtggggagaagtgtttgaatactggggacatttccaaagtattcaacacattggagttagcattgccaacagcatgagggtgagaggtgaacaacccctaatgcctgtgattccttcactcccccacccccaggcctctccatattgctgtggtgcagggtaacctgccagctgtgcaccggctggtcaacctcttccagcaggggggccgggagctcgacatctacaacaacctacggcaggtgaggctcggtctgagggaggagggctggggcctggactcctgggtctgacagaggaggggctgggggcctgaactcctgggtctgagggaggggggctggggcctggacccctgggtctgagggaggagggactggtgcctggactcctgggtctgatggaggagggctgcgggcctgggatccggggtctgatggaggagggctgggtcctgggctcctgagtctgagggaggagggctggggatctggactcctgggtctgagggaggagggctgggggtctggactcctgggtctgagggaggagggctggggtctggactctaagtagcgaggtgctccaggctcctggttcctggggaagaagggctctggggcctcggactggttgttcctgagagggagggggcctaaagacctcctagtgaggagggagggggctggggacccagaattcaggtactagggaaagaggaggttggaggcccagtcttctgggtcctggggaaggaggagcatggggcccggactcttgaatctgagacaggaggtgtctcaggtttctgttcctggggaagactgcaggatgaggaataagggttcagaaaacctgggggaggcaggactagagagcagggctggacacaggtccctcacagtcactgttccccagacaccgctccacctggctgtgatcaccacattaccgtctgtggtccggctcctggtgacagctggtgccagccccatggcgctggaccgccatggccagacggccgctcacctggcgtgcgagcaccgcagcccgacctgcctgcgagccctgctggacagcgcagctccgggcacgttggacctggaggcccgcaattatgacggtaagcatttaccgcggggcaccgctgggctgtccagcggacctggagtccatcagcggccgcaaagcccgggcctaggtttcaccgagccctcctctccctcagggctcaccgccctgcacgtggcagtgaacaccgagtgccaagaaaccgtgcagctcttgctagagcgcggtgccgacatcgacgcagtggtgagcgtgcactaggagctgggagggagcggggccttagcaggggcggggtcttggcgggggcggggccagtgtggggctggcgtgggagagcacccgggtggggtggggcttggagtatcagacccaagagagaggctggaccccgcgaatgggatgtggacgggatgcgggtcgccggctgctggagcagagcttggagaaactaagaccttccctccccgccgcaggacattaagagcggccgctccccgctcatccacgccgtggaaaacaacagccttagcatggtgcagctgctgctgcaggtgcgtacagcccccctgagcctcgcgcccaccctatcctctgaccccaacccggctctggcctcagcccctagctctgaccccgccttccacttctggctccggctcctgctccgcgtccagctctgatcctttaaggcctagttttctcgaccctcgggctccacgcccctggctacgaacttgtcccattcctcctctgccacctcaacggcctaggccccgccctgcgatggcctggctgaccccgccttccagctaggccctgtccacgcattgtccttcccccctccagctcccccgactccttggggcgcgggcctcggtgtccagctccggttaattcatcgccgccaacgcagtcccgcttggcctgcccttggctctcgctcctaccttcctgtgaccccaccccgatccggtgccgccccacgtgccggccacccacccgggcctccagcctctgttcccttaccccgggtggcccgcgcgccctcctgacccggccctcccgtcccgcagcacggcgccaacgtgaacgcgcaaatgtactccggcagctccgccctgcactcagcgtccggccgcgggctcctcccgctggtgcgcacgctggtccgcagcggcgctgacagcagcctcaagaactgccacaacgacacgccgctcatggtggcgcgcagccgcagggtgagccggggcagctgtggacatgccccttgcacacgtgtgtccgcgggctggttgcaggcgagtgtgccagagcgcagaggagtgagggtgtctgtgccgttgcgtggaggggagtgggtgagcctctgaaagcgcgggtgtgagttccagaaatgaggagagactggcaccaagaaaaaaagtgccttgcccatcttttcatactgagaagtggagaggccaccacctggatccagtgagctaggagggatgggagagaggactgtgaggcatgggtggctctatggtcacgcccatcttcctacaggtcatcgacatcctgagggggaaggccacccggcctgcttccacctcccagccagacccctcccctgaccggagcgccaacacctcccccgagagcagcagccgcctcagctccaatggtgagaaaccgttcccaacctccagccctggcgcctcctccctcagacccaggaatcccaacccacagcccctcctccctcagatccaggagtccaggcccctagcctcctccctctgacccaggaatcccaacccatagcccctcctccctcagacccctggcccctcctccctcagaccccagcccctcctccttcagaccccccagcccctcctccctcagacctcagcccctcctccctcatacccccagcccctcttatctcaaacctcagcccctcctccctcagacccaggagtccagatttccagaccctcctccctcagacctcagcccctcctccctcacacccccagcccctcctccttctgacccccggcccctcttccttcagacccaggagtctaggtccccagatgcctctttcctcagacccgggagtttaaatccccagcccctcctccctcagacccgagtccagacccccagcccctcctccctcagacccagatctcaggccccagcccctgctctctgggtctagcctctcaccacccacccctctgtctctcttccttcctcaggtcttctctccgcatcaccatcctcctcaccctcccagtctccccccagggacccccctggattccccatggctcctcccaatttcttccttccttccccatctccacccgccttcctgccctttgctggggtcctccgaggccctggccggccggtgcccccctccccagctccaggaggcagctgagggggatgggggggcagatcttggactcatgaggaggggcccccctgccctgtggggtcaacccttctggaaactgtgaagatctcactctgccccccccccccatcttcgggaccaggatttgcacagaagcacatgcacctacccatacaccccctcttctgagcacagatgttcccccatctcgctccctcccaggactctgaccccagcattctcaggcaccagtccctgtccggaatgccacccacatcttccatttccatgtcccctcccagagctggtggacccagggaacagccactcccctccactctctaccagataactgaggaggggagaggtgggccgtaacgggcacggatcacgatgtaaattattaagcattttggttggatttcttttgtaataaactatttttgtaccatatcccttgggtgcatgggcctctttcatgagatggacctggcggaagtgccttcgtgtgtgtgcacacccgtgcactgaatccagttgactcccagagtgatgttgtgagtctcagacagacaatctcctgtgtgtcactctgggacttctggtgtgtttggttgtgaatgttgccatcattgtcactgtaccattgtttctaaggaggacgtggtgtgtgatatcttttttttttttttttcaagacagagtcttgctctgtcgcccaagctggagtgcagtggcacgatctcggctcactgcaacctccgcctccccggttcaagcgattctcctgcctcagcctcccgagtagctgggattacaggtgtgcaccaccacacctggctaatttttgtaattttagtagagacggggtttcaccatgttggtcaggctggtcttgaactcctgacctcatgatcctcctgtgtcggcctcccaaagtgctgggattacaggcatgagccactgcacctggccggtgtgtgatatctttccagggcaccctgttggattccgtagtgaccctgggcatgtgtgtttctgtagtgtgggggtcctggtgataacccacagctgacttcagccccaatcgtctctggctgtccgagtgcgtggtgcttgggagtgttcctaacattgagatctggggtgatgctgtgattgttgccctgtgactgcctcacatggcgtgagacagttttacttagtggttccatggggcccctctaatggaccacatctgtggttttgttgttgtttttttggggggggatggagtctcactctgtcacccaggctggagtgcaatggcgtgatctcggctcactgcaacctccgcctcctgggttcaagagattctcctgccccagcctccagagtagctgggattacaggcacccaccaccatgcctggctaatttttgtatttttagtagagagggggttttgccacattggccaggctggtctcaaactcctgacctcaggcgatctgcctgctttggcctcccaaagtgctgggattacaagcgtgagtcaccgcgcccagccacacatctgtgctttgactctggggtatgcctctgtgtgtcagtcggggtttgtaatggtttcctgttgccactataacaaatcacaaattcagtggcttgaaatgatgctaacttttttttttttttttttaaaacagagtttcactctgtcacccaggctggagtgcagtggcacaatctcagctcactacaacctccacttccctggttcaagccattctcctacctcagcctcccaagtagctgggactacaggcgtgcaccaccacacccggttaattttttgtatttttactagtcacagggttttgacatgttggccagactgatctggaactcctgacctcaagtgatccacccacctcagcctcccaaagtgctgggattacaaaaggtgtgagccaccgtgccagccaaacaatact[187 bp omitted]gtggcgggcacctgtagtcccagctactcgggaggctgaggcaggggaatggtgtgaacccgggaggcagagcttgcagagagccgagatcgcaccactgcactccaacctgggtgacagagtgagactccgtctcaaaaaaaaaaaaaaaaaaaaagaagtccaaaattgaggccaagcctggtggctcacacctgtaatcccagcactttgggaggctgaggcaggagaatcccctgagaccagaagtttgagaccagcccgagcagtatagtgagaccctgtctgtacaaaaaaaaaaaaaaaaaaaaaattagctgggcatggtggcaggcacctgtagtcccagctactcggaagactgaggtgggaggattgcttgagtctgtgagttcgaggctgcagtgagctatgatcgcaccacagcactccagcctgggcaacaggtgaggccctgcctcaaaaaaataaataaaagaaccatggtgtcagcatctgcttcttgtggtgaaggcttcaggctgcttctactcatggcagaaggccgagggaaccacacgtgtgtggggatcaagtggcaggaggggaagcgagagagagacagagagagagaagtgccagcctccctttaacacccatctctcatgggcgtcaatggggagaactcattcacccgccagggaggacattaatctattcatgagggacctgcccccatggcccaaacacacctcacatcaggcccacctccaaccttgggaatcaaagttctttttttttttttgagacagagtctcactctgtcgcccaggctgcagtgcagaggcccaatctcggctcactgcagcctttgcctccaaggttcaagcgattctccagcctc[212 bp omitted]tctcactctatcacccaggctggggtgcagcaggagatcctagctcactgcaacctcgacctgggttcaagtgaggggatcagatttcaacatgaggttttgaaggaaaaaatattcaaaccatagcactgagtgttttttgttttttatggggttttttggtttgtttgtttgtttaatctgtgggggcttctctgggtcgtcatgtgaattgctgatagtgaacatttaatccccatcactctgtaatgtagttgcatctgtggggccagctgccttaacaacttcctggatggcatcactggggtctgtgaagggctgtgtgtgtgcacacaaacactcatgcacacgcacttctggatggcctgtgtgagcactgactgggtgacctgtgtgtgcctggcccgcctgactgggacgtccatgcgtctttctgtttgcaactatgtttcagtgtttctgacccagaccctgtgctctggtatctctgaagctgccag[136 bp omitted]atcccgtctctgctaaaaatacaaaaattagccaggtgtggtggtgtgcacctgtaatcccagctactcaggaggctgaggcaggagaatagcttgaacccaggaggcaggggttgcagtgagccaagatcacgtcactgcactccagcctgggagacaaagcgagagtccgtctcaaaaaaataaaaaataagaaataaaaaatcctgttgctgccatgcaaactgccacaaactaggtggcttaacacaacagaaatgtattcctttacagttctgaagtccggaagtccaaaatcaaggcgtcggcaggaccgcactcaccaaaaactgtaggggagactccttccttgcctcttccagcttctggtagccccaagcattcctccgcttctggctgcatcagtccagtctctgcctctgtcttcacatgatcttctcctttgtgtgtccatgtcttcttctctgtctcttatgaggacatttgtcactgagcacagtggctcacacttgcaattccagcactttggggaaggcaaggtgggaggatcacttgaggccaggagttcaagaccagcccagacaacatagcaacaccctgtcttgaagggaagggaaggggaggggaagggaggaaagagggagaggaaggaaggaaggaaggaaggaaggaaggaaggaaggaagcaagcgagggagggagggagggagagattatttctatgtttcctggtcaacatagtgagacgctgtctctacagaagatcaaaaaatgtgttggctgagcatgagcctggtggtgtgtgcctgcagtcccagctacttaggaggctgaggttcaagcatcactttagcccgggatgtcaaggctgcagtgaactatgatcacgccactgcattccagcctgggtgccagagggagatcctgtctcttgttttgttttgttttgttttgttttgttttgttttgttgttactaagtctcactctgctgcacaggctggaggagtgcagtggtgcaatctctgctcactgcaatctccgtctcccaggttcaagcaattctcctgcctcagcctcccaagtagctggaattacaggcatgcatcatc[132 bp omitted]ctcctgcctcagcctcccgagtagctgggactacaggcacccgccaccacatccagttaattttttgtatttttagtagagacagggtttcaccatgttggtcaggctggtctcaaactcccgaccccaggagatcctcctggctcagcctcccagagtgctgggattacaggcatgagccaccgcacccagccaatatttatgtttaatccttagagcaacttgcaggtttgctccaaggtttaaacatgaacactagtcaagctaattgtgctcctctcctcctatgcagtggcggcaaacagcagtgccctcagtagtatacgcagcctgctgcgtgtagcggtggccttaagagaccttggagatagccctttccgatgcatgttcatgtttctgatcttgacctcaccccagtctagactccagacaggtatgcgaggcgcctttggaaagccccagggtgtggtggccagggttcacattggctaaggcatcacgtccatccgcaccaagctgcagaacatggaacacgtgattgaggccctacccagggccaagttcaagctccctggccaccagaagacccacatctcaaggcggtgggactttaccaagtttagtgcagatgaatgtgaagacacggtggctgagaagtagctcatcctggatggctgtggcatcagatacatccccaatcataggcccctggaatagtggcgagccctgcttactcacacccaccaataaatcctccttcctgtccaaaccgaaaaaaaaaaaatatgaacgggacacagtggctcacgcctgtaatcctagcactttgggagctggaggtgggcagatcgattgagcccaggagttcaagacaagcctgggcaatatggtgaaaccctgtctctccaaaaaaaaaacaaaaattagccggtatggtggtgcacgcctgtagtcccacccactggggaggccgaggtggcaggatcacttgagcctaagaggtcaaggccgcagtgaatcaagattgcgccactgcattccagcctgggtgacagagagagaccttgtctcaaaaaaggaaaaaggtggggggaagtaaattttgtgcaatacttattacaggccatggtgctgagtaagagcttcataaatgggaattgctgttgccatcatctaagaatttttgacagttttgaggtcagaggaaacacagtagagacgatgagacctattctttgtcctggtagaaaaatggaacaatgaggtcatagcctagatgtgtgttttagctacattttttttattccacggttgtaattaaattaaataatatagctgggcatggtggcacacacctgtagtcatagctactcgggagggaggctgaggcatgaggatcacttgagcccaggagtttgagaccagcctgggcaatgtagtgagaccccatctcttgaaagagtgaagtgactcgcatctgtaattccagcacttttggaggccaaggcaggagaattgcttgagcccaggagtttgagatcagcctgggccacatagcaagatcctctctctacaataaaaaaaaaaaaattatattaggtgcctgtggtcctagctattcaaaggctgaggcagggtgcagtggctcacgcctgtaatcccagaagtttgggaggc[134 bp omitted]aggctgaggcgggagaatggggtgaacctgggaggcggagcttgcggtgagctgagatcgcaccactgcactccagcctgggtgacagaggagactccatctcaaaaaaaaaaaaaaaaaaggccgagaggagtttgaagctgcaatgagctatgattgcaccactgcactccagcctagacaacagagagagaccctatctttaaaaaatatataaaacaaagagcctgagtaacatggcaaaagcctgggtaacatggcgaaaccctatctctacaaaaaaaaacgcaaaaattaaccaggcatggtagcgtgcatctgtagtcccagctactcaggaggctgaggtaggaggaccacttgacaccgagaggtcagggctacagtgacctatgactgcaccactatgctccagcctgggtgacagagtgagaccctgtctttaaaaatataataaataaaagaagaaatatagtagcttttttttttttgagacagagtcttgctctgtcacccaggttggagtgcagtggcaaaatctcagttcactgcaacctctgcctcccaggttcaagcgattctcctgcctcagcctcccgagtagctgggattacaggagcctgccaccacgcccggctaatttttgtatttttagtagtgatggagtttcgccatgttggtcaggctggtcttgaactcccgacctcaggtgatcacccaccttggcctcccaaagtgctgggattacaggcatgagctaccacgtccacccaatagtagcttaaataagatgaaagtctatttttctctcatgtaaaggcccagcgaacacccgcatctagaatagtagccaaggatgtcagagatcgaggctccttctacctggttgttctgctgccctcacctcacacttccattgtgtggtccaaaatggctgctccagctcccaccatcacatccacattccaaccactgggaagaagaaacaaaagtcaatcgcatgcccctacctttaaagctacaacccagaagtcatacacatcatacacatcacatcctatttggccagaatttagtcacatgaccacacctatcacaacagaggctgggaaatgtggttttatctgggcagcatgtacccagccaaaattcaggggttctgctacaaaaggaagaggagagaatggttattgaggggccgcacatgtatctgtcacaaccagggctctgccaccaaatgactaaatgactcaaggtgaagtgacttcaccacactgagcctcagtttcctcacctgtaagaagggaatccccccgaccccttggggttgatgggttgttgggcatttaatgagagtgtgagtgtcaggcacttagcccaggacctggcccatcatcagtctggagtgtgttggaagtcctcttgtgcttgtgggtctaggctgtgggtgatgtggcttttcgtgtatgagaaaccgtcccggggcttgagagctgaacccagcactgaactttataagtaacttctctaaaacaagggatctggcctctgtacacatggaaatccccactcagcctcctagaccttgggactaggcacatgtccttccacagtcttcccccttccgctggagaaaggcagactccaaagatggaggaagggtcctgcttggggtctccagcctcccagccttcacagaattaagcactcatagcctggccaacatggtgaaaccccgtctgttctaaaaatacaaaaatgtgctggatatggtggcacacatctgtagtcccagctactagggagactgaagtgggaggattgcttgaacctgggagggggaggttgcagtgagccaagatcgtgccactgcactccagcctgggtgacagaaaaataataataataattcaatcactcacccctcaacttccaaagctcctcatgggtgacagtcccagcattccggggacagctctaacgccagaagtcataccttcaatgcatttctcggggctccactcgcttgtcctcaccacattgagtaaacccagaaagacagaggacatctctcctagatgcgtgtgtgaaatctgccagattctaaatgcctgggacattccaaaaagtgactttaagagcattggccgggcacagtggctcacacctgtaatcccaaccctttgggaggctgaggtgggaggacagactgagccctggagttcaagaccatcctgggcaacatgggtagaccccggctctaaccccgaacatggtggcacgtgcctgcagtcccagatactcagaaggctgaggtgggaggatcgcttaagcccaggaggttgaggctgcagtgagctgtgaccatgccactgcactccagcctgagtgacagcgagagactttgcctcaaacacacacacacagagtcaggggacggtggcttacacctgtaatcccagcactttgggaggccaaggtgagtggattggccaggagttcaagaccagcctgggcaacatggcaaaatcccatctctacaaaaattagccaggtatggtggcacccaccaacttgagaggctgaggtagaaggattgcttgaacccagaggcagaggttgcagtgagctgtgattcagccactgcactccagcctgggcgacagagggagactgtctcaaaaaacaaaaagaaaaaaaaagagtgtgagaggta[138 bp omitted]gcctcagcctcccaagtagctgggactacaggcgcccgccaccacgcccggataattttttatatttttagtagagatggg[131 bp omitted]tcagaccttcacataagccagacttttactttatagaaagggaaactgtggcccagggatggaagagactgacttggtgaatcgataggtctgggattccatgattcaccataaccaaccgaccaaatctgtcagcattcttgggacaaccagcatcgtgtgcctcctgatatcatgtacagagaaggacacagcatcacttctgtaacactcctgccaccagaatctaatcacaaggaaacatcacacaaacccaaatcaaggagaccttctccaaaagaactagcctataatcttcaaaaatgtcaattccatgaaaaacaaagaaaggccaaggaaccgtaccagactgaaggaaaccgaagagatgaaaactttttgctatgacagatagtttggggacagctggcaatttgcatacaggctgcactgttggatactactgtcactgagaaatgtacactgctcctctgtactgtggtggtgtaagagaacgtccttacacttggaaatgcaactgaagcatttagaggcaaagggacgtaatgtctgaaactattcttgcaacttctctgtaactttaaaataatttcaaaagaaaaacaaatgatttcaaag[137 bp omitted]actccgtctctactaaaaatacaaaaaattagccaggtgtggtgagatgcgcctgtaataccagctactcgggagcgtgaggcacga[134 bp omitted]gtgtttccgagtatctctaagtctgtgcatgcatttgtggtcagagtctggggagctgggggcgtgaatgggctgcttcagacactgctttgagggtgtgaccaggacctgagggtgtggttaaggtgtaggggtggggctaggcccttgggggtgggaccacagtcccagaggcgtggccagggcctcgaaggtatggccatagtttgaggcgtggccgagaaactccgttcccaagggaggtggtaactctgtgctcagagcgccctcttgtggctatcctcaggtctccactttttattcaatagctttatttcgttttatttttttcaactttcattttagattcagggagtacatgtgcaggcttgttacctgggtatattgcatgatgctgaggtttggggtacgactgatcccgtcacccaggtactgagcatagtacccaacagtttttcaacccttgccccctcccttcttccctccccactttagcagtccccagtttctattgttgccatctttatgtccctgagtactcaacgtttagctcccacttacaagtaagaatgagcggtatttggctttttcatccagcctaactgttttattgagatataatgtgtataccatacaatttacctctttaaagtgtacaattctggccgggcgcagtggctcatgcctgtaatcccaccactttgggaggccgaggtgggagaattacttgaactcaggagttcaagaccagcctgggcaacacagagagacctcgtctctataaaaataaaaataaaattttaaaaagtgtacaattcagtgactttagtatattcacaaaatagtgcaattatcaccagacttttttttttttttttttttttgagatggagtctagctctgtcgcccaggctggagtgcaatggttcagtctcagctcactgcaacctctgcctcccaggttcatgccattctcctgtctcagcctcccgagtagctaggattacaggtgcatgccgccatgcccggctaattttttatactttagtagagacagggtttcactgtgttg[134 bp omitted]aaacctcatacccattagtagtcactccctatttcccctcaacacccttccagctctagacaacccataacatactctcccttttttgtatttttggacataacatagttgtacatattgtgggggtacatgtgatgttttgatacatgtatacaatgtgcaatgatgaaatcagggtaactgggatatccatcacctcgtttatcttttctttgtgtttagaacatcacaattattctct[132 bp omitted]cctccagactagctgggactacaggcgcccgccaccaggcccggctaattttttgtatatttagtagagacgtgggtaacacggtaagacgtagtaacacggggtttcaccg[133 bp omitted]gctctgtcacccaagttggagtgcaacggcactatctcagctcactgaaacctccacctcccgggatcaagagattctcctgccttagcctcccgagtagctgggattacaggcgcatctcactgcggctggctaatttttgttttttagtagagagggggttttaccatgttgcccaggctggtctcgaactcctgacctcaggtgatctgcctgccctggcctcccaaagtgctgggattacagctgtgatctgcccaggctggccagtgactggcttctttcacttagcattatgttttttttgagatacttcattcctattagcagggagtgacatgcacctgtggtcccagctactcaggaggctgaggcaggaggattgcttgagcccggaagatcgaagatgcagtgagctgagattgtgccactgcgctccactctgggagacagcacaagaccctatctcaaaacaaacaaacaaacaaaaaatcattccttttaatggccaaagaattttccgttgtatgagcagaccacattttgattatccattcttcaactgatggacatttaggttgtttccacaagtctttgggtagatatatgcttccaattctctgggatatatatatacgtaggaatgctctagccctgtgtttaacattttggggagctgccaaactgttttccaaagcagctgcaccattttacattcccaccaacagcgtagagggttccaattatttctccatatccttgccaacacttgtgattgtctgtcttgtttatgacagtcatcgtagtgggtgtgaagcagcattcactgtggttttgatgttcatttccttagtggatcacattgtggagcatcttttcatgtcattcacttcatttgtatccactttgagtcaaatctggaaaaagagttattatagttgcaaagtggatacaaaaaaacctgtcaaatctaggaaaagagttcatatagttgcagattttttttcttttttagacaagatctcactgggtcatccaggctggagtacagcaacacaatcatagctcactgaagcctcaaactcctgggctccagcaatcctcccacctcagcctcccgagtagctgggaccacaggcagcatcccagcatgcccagtttttttttgttgttgttgttctttgtttttgtctttttcagacggagtctcgcgctgtcgcccaggctggagtgcagtggcatgatcttggctcactgcagcctccgactcctgggttcaagcgattctcctgcctcagcttcctgagtagctacgattacaggtgcgtgccaccatacccagctaagttttgtatttttcatagagatggggtttcaccatgttggtcaggctggtctcgaactcctgagctcatgatccgcctgccttggcctcccaaagtgctgggattacatgcgtgagccactgcacccaaccatttttggttttttggttttgctttgttttgtttttgtttttgtttgtagagacagggccttgctatgttgccaggttggtctcaaactcctggcttcaaccgatcctcccacatcagcctcccaaagtgacaggattacaggcgtgagcaccacccctcttccagcttgtggtgttcactggtaatctttggtgttgtttggcttatagatgcatcactccaatctctctgccgccatcgtcatatgttgtgtgtgtgtgtgtgtgtgtgtgtgtgtgtgtgtgcacctgtaactgtatccaaatttccttttcataaggatatcagtcagatttaggacccaccctaatccagtagaaacttatcctgatctgattacatttgcaaagaccttatttccatatagggtcacattcataaattccagtgaacatgaacttggtggggaggggaatgattcaacccaggccactcattattatgtgtttatgacacacactgttggtatttgtgtccagttcattcaccttaattgctgcgcaagagtttattgtgagagtacaccacaatttatgtcaggctgctggtggtgaacacccaccttgttgccaatttcctccacttccaacaagaatgcaattaacatccctgaacatgtctcttggagtttcttagggcagtatctttcaaacggccaaacaagatccattagtgggttgtgaaatcaatttagtgggttataaacaatttttcctttaatgaaatggaattaaatagaagctattagagtgcatgctcatagtcggagtgagagctcttctgtgaaacttttgcttcaggtgtctatagctgtattaatgtccagcaaaagtgtttacaagccacagctctgaaagaggtaactggacaaatgacctgtccatttgtccaaaggtctcgtggatgctgccaaattgctctgcaatgtagtttgtccatttgcactcagagcagctccttgccaatacttgccagtcaacactttgaactttttcaggctaatgggttttcatcctgttttgttttttgttttgttttgttttgttttgttttgttttttgagacagtctcgctctgtcgcccaggctgtagtgcagcagcatgatctcagctcactgcaacctcttccccccgccgggttcaagcgattctcctacctctgcctcacaagtaactgggattacaggcacaccactatgcccagctaatttttgtattattttaattatttatttatttatttttatttatttatttttgagatggagtctcactctgtcacccaggctggagtgcagtgctgcagtgttggctcactgcaacctctgcctcctggattcaagcgattctcccgcctcagcctcctgagtagctgggactgcaggcacgcaacaccatgcccagctaatttttgtattttgagaaagggggttttgccatgttggccaggctagtctccaacttctaacctcaagtgatccacccacctcagcctccaaaagtgctgggattacaggcatgagcaactgtgcccagcctaatttttgtatttttagcagagatagggtttcaccatgttggccaggctggtctcaaactcctgaactcaagtgatccacccgccttggcctcctaaagtgctgggattacaggctacaggcatgagccaccacacccggcccaatctatttatttattttatttttttatttattttctttttggtcgttttttaatttaaagaaaaattttaagattttcaattcctacgagatgggggtggggctaaggaggggctcagggtgcattgggaggttcggctctcatcctatgccccctacccgccgacctcaaaggacttttgagaattcagtgtgccaatgtttgcaaagcattacacacagggcctgatagacagcaagcattcaataaatgctagctatggccgggtgtagtggctcatgcctgtaatcccagcattgtgggaggcccaggctggaggattgcctgagctcagaagttcaagaccagcctgtgtaacacagtgagacatcatctctactaaaaactaaaaaaaaaaaaaaaaaatagccaacgtggcagtgcatgcctgtagtcctagttactagggaggctgagacaggaggaccacttgagccccagaggtcaaggctgcaatgagtggtgatccaacaaccactgcactccagcctaggagacagagcaagaccctgtctcaaaaaaataaaataaaataaaataaaagttagttattactattattctctgattcaaagttctctagatatgtgcacatttgcgatcagaacttggcctggtctgaccaggcatggtggctcacgcctgtaatcccacctctttaggaggccgagcaggcaggattgattgagcccaggagatccaggctgcagtgagctatgatcaggccactgcactccagcctaagcaacagagcaagaccaagcaagaccctgtatcacaggaaaaaaaaaaaaaaaaaaagaacttggcttggcctaggatggggcgcggccagaatgccttgcttaggggcgaggcccacagcgccccgatggctgcccagcgagcaactgagcaaccaggctgatgttacaggttctacaggttgggtgaaagccacgcccggccacccctacacaaatgagttgctccccgcccccacagtcttgaacgccatcctcccgcctggcttcttcgggactcaggagtatcttaactctggcctgatttctcccatgccacaccattaggggcacccagaaatcttgttgccaaattcctgccccctcagacacccactttcaaacccttgcttctagggaacccaagggcctggtggctctgtgcctccttcctcggagacagagagagagcaatgcctccctgaccggttcctccttgaaatctcagttatctgacctttaatcccatgccacgaccaaagacccataccttcgacaaggcgctgtgtccaagtcccacctctcggtagctcccagcccttcccctcccctctccaagaagagtcccgtggcagggcaaaatggctcacgcctgtaatcccagcactttaggaggccgaggcggatgcatcgcttgagctcagaagttcaagaccagcctgggcaacatggtgagaccccgtctctactaaaaatacaaaaaataaaataaaataaaatagccaggactgctgatgcgcgcctgtgaccccagctactcaggagggtgaggtgggaggatcacttgagcctgggagacagaggttgcagtgagctaagatctcaccactgcactccagcctgggtgaaaaagcaagaccctgtctcaaaaaaaaaaagtcccaggcctcccctagccccttgcccctctctgaagggacccagatatcctacctgcacttcccacccacacactgagaagccccctcctaccgctacccaccaaagccaccccaccctgctcctttttgagaatcaaactcaaaccgcaccagctaatttttttttcttttttgtatttttagtagagacacggtttcaccatgttggccaggctggtctcgaactcctgacctcaggtgatccgcctgcctcggcctcctaaagtgctgggattacagttgtgagtcatcgcgcccagccacattttattttatttttaaaaattttttagagatagggcctcactatgttgcccaggctggttttgaactcctgggctcaggtgatccttccacctcggccacccaaagtgctgggattacaagcatgagccaccgctcccggcctccaaatcccacctcttgaagacccacgtgccaggtcctccagcccccgccccctttggagacactggtacctgcaggcccctccccggttctctaggacccgccctctcctttcactctgggcgaggccgcccctatcccagccgcaccggtccttcccggcacacgcgaggctcccatggctctggcggtggccccgtgggggcgacagtgggaagaggcccgcgccctgggccgggcagtcaggatgctgcagcgcctagaagagcaatgcgtcgacccccggctgtccgtgagtcccccttcgctgcgggacctgctgccccgcacagcgcagctgcttcgagaggtggcccattctcggcgggcggccggcggaggcggccccgggggtcccggcggctctggggactttctactcatctacctggccaatctggaggccaagagcaggcaggtggccgcgctgctgcctccccggggccgaaggagtgccaacgacgagctcttccgggcgggctccagactcaggtgagccttcgccccagaacaaagtcctctggggtgaggcccaggtcttgctcccagcccctcctcccccagacccaggaacttaggcccccaccccctcctccctcagacccaggaactcaggcccccaccacctcctccctcagactcagggctccagcccccagcccctcctccctcagacccaggggtccaggccccagcccctcctccctcagacccaggaactcaggcccccaccccctcctccctcagactcagggctccagcccccagcccctcctccctcagacccaggggtccaggccccagcccctcctccctcagacccaggaactcaggcccccaccccctcctccctcagactcagggctccagcccccagcccctcctccctcagacccaggggtccaggccccagcccctcctccctcagacccaggaactcaggcccccatcccctcctccctcagactcaggggtccaggcccccagcccctcctccctcagacccaggggtccaggccccagcccctcctccctcagacccagaaactcaggcccccatcccctcctccctcagacccagggatccaggccccagcccctcctccctcagacccaggggtccaggccccagcccctccttcctaagggaacctggaaaatgggccacccagttttctccttccttgggcacccatgccctcagcccgattttgccatttccttggtcacccagcagcccaattctggttcccactatcccactatctcagaattcagggaccccatggggtttcctacactgaggataaaataaaagttagctattactattattctctgattcaaagttttctagatgtgtgcacatttgtgatcagaacttggcctggtctggctgggtacggtggctcacacctgtaatcccagctctttgggaggcccagctgggaggatcaggcctcagaatgtggagaccccatgggctcctaggtggaggagaggtagatggacacacccaaagaaactgatcattaggcccccatcacggtttctgcctggactacccacttggtctttagttcctgaggaacagctggctccagacccaggacctgcctggaggccacccctctgctgttctgcactgaggaaggaatctcagagtgaccaggcagatgaggtttggggcccagagcccagaacaaggtctagttcagggacccatgccacttctttatattaaatattttgtagtgtctctttttttttttttttggacacaaggtctggccctgtcgcccagactggagggcagtggcaccatcatgactcactgcagcctccaactcctgggctcaagtgatcctcccacctcagcctcccatgtagctgggaccacaggcgtgcaccaccatgccagactaatctttttattttttggtagagaggaggtcttgctatgttggctaggccggtctcaaactcctggcctcatgcgatcttcgtacctcagcctcccaaagtgctgagattataggtgagagccaccatgtccagccaagtgtttccttaattcatcctgagaggacatgcagaggttcaacaacctacccacctatagttttttaatcactataatgcccaaattataagagagtgatcaaaggaatttttttcataaatattatctatgttttaaatgaaaatgccaaggcacaattattcttggaaggcagagctgactagtcagacactcgtacctgtaggtagaaccactgtcatacagaatcaaatagtcttcccttaatatataggagagctggatttctgcaaaattcagcgtaatttttttttttttttagacatggtctcactctgttgcccaggctggagtgcagtggcgcaattttgactcactgcagcctctgcctcccatgttcaagcaattctcctgcctcagcctcccaagtagctgggattacaggcacccgccaccacgcagcgataatttttatagtttttattagagacagggtttcaccatgttggccaggctgttctcaaactcctgacctcaagtgatccacccacctcagcctcccagagtgctgggattacaggcatgagccactgcttctggccaaaatctaataaaagccatgtatatcgtttttaatttttttttttttttttttttgagatggagtcttattctgtcatccaggctggagtgcagtggcgtgatctcagctcactgctacctctgcctcccgggctccagcgattctcctgcctcagcctcctgagtagctgggattataggcgggcgccaccacgccaggctaatttttgtattttcagtacagacagggtttcaccatg[137 bp omitted]agccttatccctgcaggtgttccccatgaggggaggaagagggtgtcagtgggagccccaaggatagccagagtccttgcccatccccacaggcgacagctggccaagctggccatcatcttcagccacatgcacgcagagctgcacgcactcttccccgggggaaagtactgtggacacatgtaccagctcaccaaggcccccgcccacaccttctggagggaaagttgcggagcccggtgagtaagcccttgtcctcagctcccggagccccatcctgccctggcccagggacccaggggtccaggcccacagctgcttctttcctggagaccctcccatcataggctctgggaggcctcagcggtgtctcccccacccctctcccacccaggtgtgtgctgccctgggctgagtttgagtccctcctgggcacctgccaccctgtggaaccaggctgcacagccctggccttgcgcaccaccattgacctcacctgcagcgggcacgtgtccatcttcgagttcgacgtcttcaccaggctctttcaggtcagggaaggccaaggctgggagctagacttgggtccaggaggaagtagagggctgaatcctggattcctgggtctgagggaggaagggccgggacctggactcctggatctgagggaggaggggccggggcctggactcctgggtctgagggaggagggggctgggacctggactcctgggtctgagggaggaggggctgggggcctggactcctgggtctgagggaggagggggctggggacctggactcctgggtctgagggaggaggggccggggacctggactcctgggtctgagggaggaaggcctggggcctggactcctgggtctgagggaggagggcctggggcctggactcctgggtctgagggaggagggcctggggcctggactcctgggtctgagggaggagggggctggagacctggactccagggtctgagggaggagggggtgagggcccggactccagggtttgagggaggagagggcggggggcctggactcttgggtctgagggaggagggcctggggcctggattcctgggtctgagggaggagggcctggggcctggactcctgggtctgagggaggaggggctggggcctggactcctgggtctgagggaggaggggctggagacctggactccagggtctgagggaggaggggctggagacctggactcctgggtctgagggaggaggggctggagacctggactccagggtctgagggaggagggggtgagggcctggactccagggtttgagggaggggagggctgggggcctggactcttgggtctgagggaggaggaagctagggtcccaaactcctgagttctggagaaagaagagcttggggtcttgtaaaagggatatgcctgaggcccaccatgggtgtgaaggaggtggttggatcctcgagccctagggactacttagggatgtgagctgcttccctggtcgctccctgacccaagccctgccccaccccagccatggccaacactcctcaagaactggcagctcctggcagtcaaccacccaggctacatggccttcctcacctatgatgaggtccaagagcgtctgcaggcctgcagggacaagccaggcaggtaaagggtccagggctcagcagaacaaggctgcagggctcagggatctgggctctgggctggtgcgtggtggagcccagatgtccttccaagagtgggaacagaggtacccaggaccccagagagttgataactcagaggcaggacactgagtgcccctcccagcccgcctcttctctcgaggcctcctgtactgtcccataatcctgcagctaagggacagtgcccgctctagcaaggagcccaaagacccgcttgagggtaaggtccgtttctggtaggtcagagtcatgttgtaccatctgttcagtattttgagtatgaatttcccacctgttggcataggagactgaaaaacaagacatgagagtccttaaattatttcaaccaggagttttgagctgttgggtccccctagagggctgagaattgagctgtctagataccaagagaagagaaggtcaggtttgtgagtctctgcagggctgaggtgcaggggtaggacggtgagtgcgttagcattcttccagttacacttcaaacttatttaagggaaaagaaaaaggaaagaataaattcctataattgaaaaggccaggccccgcacagtggctcacacctgtaatcccagtactttgggaggccgaggcgggcaaatcacttgaggtcaggagttcgagaccagcctggccaacatggtgaaacctcatctctactaaaaatacaaaaattaggcctggcgcagtggctcacgcctgtaattccagcattttgggaggccgaggtgggtggatcacctgaggtcaggagttcaagaccagcctggccaacatagtgaaaccccatctctactaaaaataccaaaaatttagccaagcgtggtggcgtgcacctgtaatcccagctacttgggaggctgagacaggagaatcacttgaacccaggaagtggaggttgcagtgagccaagatcacgccattgcactcctgcctgggcaacaagagtgaaactccatctcaaaaaaaaaaaaaatacaaaaattagcctggcatggtgatgcgtgcctatagtcccagctacttgggaggttgaggcacaagaatcacttgaactcgaaaggtggaggttgcagtgagccaggatcccgccactgcactccagcctgggcaacagagcaagactctgtctcaaaaacaaaaaggaagaaaagaaaagaagcctagggtgtgggtttcaggcacagctagatccaggtgctcaatggctactgtcaggaatcagttcctgttcatcccctttctctgctttcctctgtttgcttcattctcaaacatggtttctcctcattgtggcaaatgacttctagaagtcccagctgtgtaccctaccttcttagcaacctctgtaagaaagggggcaccttgctctgacacttgcagcgaaagtcccagaacggactcccatcactgtggtcaggggtcctgaaatgcactgattggccaccccagccttgtttaaactccagtgaagcgaggagagatctccaaatggaatcagggctgtttttatcataaaagagccaagcaggcaaaaacagcatatatcccctagagaggcaggcaggggtctagcacatgccgttgcctagaggatgggaagctgggggtgaggacctagacacctggattcccaacaggccaggggactggaagttcacaaaagggatggcagtgaccactccctcaccccatcctacctacctctccctccagttacatcttccggcccagctgtactcgcctggggcagtgggccatcggctatgtgagctcagatggcagcatcctgcagaccatccctgccaacaaacccctgtcccaggtgctcctggagggacagaaggacggcttgtgagtctccattctggtaggaggagggtgtcagcaaaatctggttggaaagatcttgcatgttgtgcactgccggtggccaccacgtttgagggtgcaaccattcacataggggacatctcaaatctgcagtactacaaaattccagcaggtggcagtcaaaggtcttgaggaaggggcgcctctgagggtcgcacaaagtggccatagatcgggcccagccacagctccgaggagaagtgtgtggggcattgggcacaaccgcaagggctccattccttggaactgagctcaagagcgtttgcttctattttcttcctcttttactttagttaatttttaaaaaatgagatggggtttcgccatgctgcccaggctggtctggagctcctgggctcaagcgatcttcctgcctcggcctcccaaagtgttgaaatgacaggcgtgagccaccgtgcccagccagcttttgtttctagatatgagatcctgctctagaatctagattgatgg[137 bp omitted]acctctgcctcccagattcaagcgattctcctgcctcagccgcctgagtaggtgggattacaggcacccaccaccacacccggctaattttttgtgtgtgtttttagtagagacagggtttcaccatgttggtcaggctggtctcgaactcctgacctcatgatccacccacctcggcctcccaaaatgctgattacaggcatgagccaccatgcccggtcctaagttttggatttttaatagagatggggttttgccatgccaggctggtctcaaactcctgacctccagtgatcttcccttctcgaactcccaaagtgctgggattacaggtgtgagccactgtgcccggccaggaagacaggtttcttttcagagtttcacctttagccagaattttcttatcagtcatatctatatgactactgacatacaagagaggagataggaaggtaggtagctagctagatagtcagataggtagatagatagatagatagatagatagatagatagatagataggcagataggtagatatgctgttgattatttgcaataattattat[132 bp omitted]atggtgaaaccccatctctactaaaaattaaaaaaaattagctgggtgcagtggcgtgcacctgtaatcccaactactccagaggcagaggcagaattgcttgaacctggcaggtggaggtttcggtgagctgatatcacgccactgcactccagcctgggtgacagagcgagactccatctgaaaaaaacaaaacaaaaaaattttattgtatatttggtagagatgggggtggggtgtggctcaccatgttgcctaggctggtctcgaactcctgaactcaagcaatctgcccgcctcaccctcccacagtgctcagattacaggtgtgaaccacacgcctggccaatttatagtaattatcttctataaaatcaccacacaccctgaattattgaatatcaagccgttgctcccaggggaaatacattcttgggtcctgagtagctaggactacaggtgcacgccaccacgcccggctgggtcaccacatttttgtcaaccagtcacaacatagtaacctttatgtatgttttcgtttaaagacactttattcaaggccgggcgcagtggctcacacctgtaatcccagcactttggaacaccgagtcgcgcagaacacgaggtcaggagatcgagaccatcctgcctaacactgtgaaaccccgtctctactaaaaacacacaaaaaaaattagccgggcgtggtggcgggcacctgtagtcccagctactcaggaggctgaggcaggagaatggcgtgaaccctggaggcggaggttgcagtgagccgagatcgtgccactgcactccagcctgagcgacagagcaagactccgtctcagaaaaaaaaaaaagaaaaaaagaaaaaaaaattgacactttattcagtacctattgttggttcgctaacattgaactcacaaccaacagcagtataacttgtgtctcagcaaagcttatacaacacacacgttttctccataagacacatcacagccttctttcacttaggaacaggagacaacacttcagctactcttggggaccatttaaaacagaaaaatcagaggccgggcatggtggctcatgcctgtaatcccagcactttgggagactgaggcaggcagatcacttgagatcaggagttcgagaccagcctggccaacatggtgaaacctggtatctagccaggcatggtggtgtatgcctataatcccagctactcaggaggctgagacgagaattgcttgaacccgggaggttgaggctgcagtgagccaagatcacgcctctgcattccagcttgggtgacagagtgagattccatctcaaaaacataaaaataaagtcaatcataagctgggcgcagtggctcacgcctgtaatcccagcactttaagaggctgaggtgggtggatcaccaggccaggagatcgagaccatcttggctaacacggtgaaaccctgtctctactgaaaataacaaaaaattagctgggcgcagtggcgggcgtctgtagtcccagctactcaggaggctgaggcaggagaatggcgtgaactcgggaggtggagcttgcagtgagccgagatcgcgccactgtacttcagcctgggtgacagaaccagactctgtctcaaaaaataaaaataaaaataaaataaagtcaatcgtagaagtcccttcttattgggtgtttatgcacagaggaggacgctgcatttaaaatttttttctaatttaaaaaattta[210 bp omitted]gaggcaagagaattgcttgaacccgagaggcagaggttgcagtgagccgagatcacgccattgccctccagcctagggcacaagagtgagacttcatctcaaaaaaaaaaaaaaaaaatttattcgccaagcatggtggctcatgcctgaaatcctagaactttgtgggaggatcacttgagcccaagagtttgagaccaacctggacaacatagtgagcccccatctcaataaagagaaaaaaagaaaaaaaaaattagttaccgacaaggtatcactatgttgtccaggctggcctcaaactgctgggctcaagcgaccctccctcttcggcctcccaaagtgctggggttacaggtgtaaaccactgcacctggccagcgcttcatgtttcttttggtggttctttttttttctgtgacagggtctcactgtcacccaggctggagtgcagtgacatgaacacggctcactgctgcagcctcgacctcccaggctcaggggattctctcgcttcagcctctcctgagtagctgagaccacacgcacatgccaccatgcccagctaatttttttaatttttttttttttagacatagtgtctttctgtgttgcccaggctggtctcgaacccctgggctcaagcaatcctcccgcctcagcctctcagagtgctgggattcaggcatgagccactgctcccagccagggctgcatgttttataagcactgtctttcttatttatttatttttaaaatttcttttttttttttttttttgagacagagtcttgctgtgttgcccaggctcgagtgcagtggtgcgatatccattcactacaatctctgcctcctgggttcatgaaattctcctgcctcagcctcccaagtagctgtgattacagacacgcacctccatgcctggctaattattattgtatttatttatttattttgctatttttagtagaaacggggtttcaccatgttggccaggctggtctcaaactcctggcctcaaatgatctgcctgccttggcctcccaaagttctgggattacaggtgtgagccactgtacccggccagcactgtcttatttaatccatcacaaatctttgcctcaggcatgatcatgtccatgttacagaaggggaaactgaggccagaaaggtcgagtggccccagccaggtcacacagtgtgttagtgagagagccactgtggggcccaggtcagggatcctgcactgctccacatgacaggccaggcagggccactagcctcagggagtctgagggtccaatatttcatgtgctatacatgtcggaataactggagtagcattgaggcatgccagataggccgaggaaatgatccagggggagacccagggagcccagagcttgcttctccggtgtcctggagcccagtgctgagatctcgcctacaaccctggttctcggtctctctggtccttgctgtgtgaccttgggcaaatgcctttcccaccctgagccttgggtcactgtctgtgagggaagaagtggtacaggtgctctcagaggatctttccatcctgatattatcagattctaggatttgatcactttcatgatctgtgacactaaaatctgttatgcttgggcgtggagaagggtgaggttctagaagagctaagccagagattttcccttttttttttttgagacagagtctcactctgttgcccaggctgcagtgcaatggcatgatcttggctcactgcaacctctgcctcctggattcaagcaattctcctgactcagcctcctgagtagcatgcaccaccacgcccagctaatttttatattttcagtagagacggggttcca[134 bp omitted]cttagtctatctcatccttgtttctggagcttgagtcactgaggttttgtgtgccctaccttgggagtctgaggggacatagccctgccctggggtatctgagaagacacagtcccaattagaggtgggtggagggaaaataagcccaggccagcaatggatttgggacagatcctcaactcagggaaatatggggccctgtagggggtaaaggtacttgttcatctgggggtgggaaatactggatggccccccagtccccctctcttcccttcccccagctacctctacccagatggaaagacccacaacccagacctgactgagctcggccaggcagaaccccagcagcgcatccacgtgtcagaggtgagacccgcacctgcacccgcagtcccagttccctgaccctgccacccccacgttgccttggctcagaggcctggggttggaatgttggcttggtggctctgtgaccttgggtaaatcacttgacctctctgaggctcagttattcttccggaaaatacggctcctcctgcctctttcccaggggtgatcacggggattaaataaggaactgatgctgctgagatcatcaggacagctaatgcattcgagcatttgccagcaatagccccgtgccagctcctaatcttcacagccaccctacgagtgagaaaaacaacaataacaaataaataatttattttttatttatttttatttttagagacagaatctcttctgtcgcccaggctggagtgcagtggtgcgatcatggctcactgcagcctcgacctctgggctcaagcaggcctcccacctcagcctcccgagcagccaggagtacaggtgtgagccactgcacccagctaatttttgtatttctctgtagagatggggtttcgccatgttgcccaagctggttttgaactcctaggttccagcaatcctcccgcctccacctcccaaagtgctgggattatagccatgagccactgtatctggccctaaattttttttagtataaatatatcccgtgcaatatttgggacatccttatacttcaaattgtattcacggtttacatgaaattcaaatttggaggccgggtgccaccgcacccataatcccagcactttggtaggccgaggccggcagatcacctgaggtcaggagttcaagaccagcctggccaacatagtgaaacccatctctaccaaaaatacaaaaattagctgggtgtggtggctcacacctgtagtcccagctgaggcacttgagttgggaggctgaggcacgagaatcacttgaacccaggaggcggaggttgcagtgagctgagatcacaccattgcactccagcctgggcaacagagtgagacttggtctcaagaaagaaaaaaaaaaagaaagaaagaaattcaaatttaggttaggcacagtggttcatgcctgtaatcctagtactttgggaggctgaggcgggtggatcacttgagcctgggagttggcggttgcagtaggccaagattgcgaccctgcacttcaacctgggtaacggagtggggctctgtcccgcaaaaaaaaaaaaaaagaaagaaagaaaaataatgaaattcaaatttagcagcatcagcatccaatacttttatttgctaaatctggcaccactgggtgtagacaactggggagaagaagtctcataacaaggagtgaagacatggccgggcgaggtggctcacgcctgtaattccagcactttgggaggccaaggcgggcagattacttgaggtcaggagttcgagactagcatggccaacatggtgaaaccccatctctactaaacatacaaaaattagccaggtatggtggcttatgcctgtagtcccagctactcaggaggctgaggcacaagaatcgcttgaacctggaggcaaaggttgcagtgagccaagatcgcgccactgcactccagcctgggcaacagagcaagactgcgtctccaaaaaaaaaaaaaaaaaatgagtgtagacatgtaggaggccattggacatgccagccttggacttaggagagggttcagttctggcacagaggtttggtttattattttttttttaaatagagacggggtcttactatgctgcccacgctggtccagaactcctgggctcaagcattccacctgccttggccgccagaagtgctgggattacaggcatgagccacagcgccaagatagaggaggtgtgggattttctttctttcttttttttttttttgagacggagttttgctcttgttacccaggctggagtgcaatggtgcaatctcagctcactgtaacctccatctcccgggttcaagcgattctcctgcctc[222 bp omitted]cgtggctgacgcatgcccctcgctgtcttctctatcctctcacctgccaggagcagctgcagctctactgggccatggactccacatttgagctctgcaagatctgtgctgagagcaacaaggatgtgaagattgagccgtgcgggcacctgctctgcagctgctgcctggctgcctggcaggtgggtctgacccctgtggcgccttcccctctggtctccccctctctacagggaaagccccaaaaggatctccatgcctcattgatcatatggggaaaccgaaggccagagagggcaaagagctgatggcaaccactcaggagcccggctgtctttcccagggcctctggttccatcccactctgcacacgctgcctctgtttctccctctccggcaatgttatcagtggaaagctctccttccttctctgcctaggtgatccccagccagtggcttcacgtctctgagccttagcctcgtcccctggagaacggggctgagaatagtgacctcccaaaggccacagtgaggctgggcacggtggctcacgcctgtaatctcagcactttgggaggccggggtgggtggatcacttgaggtcaggagttcgagaccagcctggccaacatggtgaaaacccgtgtctactaaaaaaaaaatacaaaaattagacgggtgtggtggtaggggcctgtaatcccagctgctcgggaggctgaggcatgagaatcacttgaacctgggaggcagaggttgcagtgagcagagatcgtgccgctgcactccagcttgggtgacagagcgagactccgtttttttaaaaaacaacaacagcaagggccacctgagggtctgagcctggaaaggcctggcccggaagctgtggccacagctccatggggatccctggcctgtgtgccccctcctgacctcggctctggttccgttcctctctcaccttccctcccagcatttccctccacattcctctgctctccacgactcttctctccttccgtctcccttcctctgtctgtcttccccacatcaatcttttgggcggggagctcctcgttggcccaagggacaggatggagagcaggggagcactgaccctttccctcccgacctcccccagcactcggacagccagacctgccccttctgccgctgcgagatcaagggctgggaggccgtgagtatctaccagttccacggtcaggctactgctgaggactcagggaacagcagtgaccaggaaggcagggagttggagctggggcaggtgagcagggccagccgggagctggaatccaaattcctgaggcctgagtggggagggactggagcctggactcctgggtctgagggaggagagactgggggcctggactcctgggtctgagggaagaggggttggagcctgtactctgagtctaagggaggagggctgggggtcctggactcctgggtctgagggaggaggggctaggggcctggactcctgggtctgatggaggtgggtatggggacctggactcctgggtctgagggaggagaatatgggggcccggactcctgggtctgagggaggaagagctgagggcccacactcctgggttctaggagaggagggggctgataacaagattctcaggtcctagggaactggtcttttgcttccccaagggctggggctgtggctttccctggctgtaaccctcctaagtgttcatacgttgtcttggtctctgttatatcttgagtctagaacagtgcctgaatgctgagtcccaggcaggagaacatggaggcgagaagaaaatggcagctcacaagccccttctccttcctctgtcccaccccaggtgcccctttcggctcctccattgcccccacggccagatctgccccccaggaagcccagaaatgcccagccgaaagtggtgagtcaggcgctggtctgaggttgggggctggggtctcactcacctccagggtccctggttcacctgtgcactcaggggtgccagggcagggactcatccttggcacccatttccaaggcacccatcccctctgtgacctcttcccttgttttcattccccctctgggactttctttttttttttttttttttttttttgagacggaatcttgttctgtcgctcaggctggagtgcagtggcgcaatcttggctcactgcaacctccacctcccgggttcaagaaattctcctgcctcagcctcctgagtagctgggattacaggcacccaccaccatgccccgctaatttttgtatttttagtacagacagaatttcaccatgttgatcaggctggtctagaactcctgacttcattatctgcccccctcagcctcccacagtgcggggattacaggagtgagccactgcgcctggcctcaaggactttctagctctccttccagcatcccagatgtgtcctacctcggggcctttgcataagctgttcccttggcctgcacagtctttcctgaggcttgctttcccatcccttttcagggaggccttccctgaccactctgttcaagatagcacccctagctggggtggtggctcatgcctgcaatcccagtactttttttttttttttttgagaggagtctcactctgtagcccaggctgcagtgcagtggcataatctcggctcacagcaacctctgcctcccagattcaagcaatgctcctgcttcagcctcctaagtagctgggactacaggcacccaccaccatgcccgactaatttttggatttttagtagagacgaggttttgccacattggccaggctggtctcaaacccctgccctcagctgatccaccgccttggcctcccaaagtgctgggattacaggcatgagccaccatgcccggcctgcaatcccaacactttgggaggccaaggcaggaggacggcttgagcccaggcatttgagaccagcctgggcaacatcacaagaccccaacactacaaaaaaattttaaaattagcccaaagtggtggcgcacacccgtagtcccagctgctcaggaggctgaggtgggagggtcccttgatcccaggagttggtagctccagtgaggcgtgatcacaccactgcactccagcctgggcaacagaatgagaccctgtctctaaaccaataaaaaaaaagagtctgtaatcccagctgttagggaggcagaggcaggaggaaagcttgagcccaggattttgagacctttctgggcaatatagcggaaccccgttctctaaaaaaaaaaagaaaagatgaaaatagcaccgctgtccctcggggccctgctctgctgtatgttcaaagatctttcgccacccggcagagcttagggttggttttgtcggcttttatcactgtcaggttgcaaccttcctgcaggtcaggcctttgttgtcttctccgtcatatctccagagtgcagaacagtgcctagcacacatacacgtcataggtgctcaataaatagatgccaaatgaatacactgaagtgagtcttcccaacagccctatgaagtcaaaagtgttcctctcccggctgggcgcggtggcttatgcctgtaatcccaacattttgggaaggtgaggcaggtggatcactgagttcaggagttcgagaccagcctaaccaacatggtgaaaccctgtctctactaaaaatgcaaaaattagctgggcgtggtggcgcacacctgtaatcccagctacttggaagactgtggcaggagaatcgcttgaacccgggaggtggaggttgcagtgagccaagatcgcgccactgcactccagcctggatgacagagggtgagaccctgtctcaaaaaacaaacaaacaaatgaatgttcctctccccattttccagaggaaaaaagttcagagaggtgacagtacctgcccaaaaccacacagcctgaaagaggagaagtcagcgttggagtctttaaggcccccaaaccatctacttatttttttgttgtttctttgtttgtttgtttttcttttgagatggagtttcactcttgttgcccaggctggagtgaaatattatgatctcagctcactgcaacctccgcctctggggttcaagctaattctcctgcctcagcctcctgagtagctgggattacaggcaggtgccaccacgcctggcaaattttgtattttttagtagagatggggtttc[132 bp omitted]ctttcttttctccctacgctgccaccccaggatttttgggaccctggattgctggggagaagcagatctcttagtatctccggctgagtacacacaggcttcgatcaatactgagctgtcttcaaacaaacagctcaggaagtccgggaacattattcgaccacagcaaacaagagagccagcaggaagcggggcggtgggggggagggtggcggtgaaaccagccagggaagctaaaaacagatccaacctgccgccaaaagcaaatggaaacattaggaggcactcagccggctcccagaggacagtgatgggggacacagccaggacagcaggctgacagggacctcgggcctgatggtgacacctttgcctaggccataccctccgcctcccccaccctttcctcctctccccaaaccctgcctgattaaaattccagtccactcccacctagtctttcattcttcaaaacataccacagaagagacagccttgggtttgttacttctcagcaaggcactgtcataacttttgttgttgttgttgttgtttgagatggagtctcactttgtcacccaggctggagtgcagtggcacgatctcagcccattgcaacctccgcctgccaggttcaagcgattctcctgcctcagcctcccgagtagatggggtcacaggtgctcaccaccatgcctggctaatttttgtatttttagtagagacagggtttcatcatgttggccaggctggtcttgaactccttacctccggtcatctgcctgcctcggccttcttaagtgctgggactacaggagtgggccccgcctgtcataacttttgctatgtgcctggcattgctttttttttttttttaagatggggtctctgtctagcggagtgtggtggcgtgcacctgtaatcccagctactcaggaggctgaggcaggagaatcgcttgaacccaggaggcagaggttgcagtgagccaagatagcgccattgcactccagcctgggcgacagagcaagactccatctcaaaaaaaaaaaatagggtctctgtcagccaggctggagtgcagtggtacaatcacagctcactatagcctcaatcttctgggctcaagtgatcctccctccttagcccccagagtagctgggactacaggtgcctgtctccacacccgaatcatttttaaattttttgagcagtgaggctggggctgctgtggacactggatgtgatgggactgtgtcagtggtcagtgtcaccgtggttgtgatctgtgtatggtgctgtggcccctggggttgctgtctgcacgctgctgttctccatctgagaaacctccctttaggggacgacactgccattgagctggatctcatcaccccactgaccactgaggacctctctgaccctcagtgttttcatggggaaaatggggaccagcctgacacaagccccacaggctgggtttttttgtttgtttgtttgtttgttttaatgttttaatttaattagagacagagtctcaccgtgttgccgaagttggtctctaactcctgggctcaagtctcccaaagtgctgggattgctggcattagccacttcgtctagcctccccatgagttttgatgaagccagcaagctcagtcatctctaacctgagtcatatcccctccctcacctctcagaaatctccactggcagccaagcgcggtggctcacacgtgtaatctcagcactttgggaggccgaggtgggcaaatcctttgcttgaggtcaggagttcgagaccagcccggccaacatggtgaaaccccgtctctactaaaaaatacaaaaattagctaggcgtggtggcgggcacccgtaatcccagctactcgggaggctgaggtaggagaatcgcttgattctcgcttgattatcgcttccgccaggaggtggaagttgcagtgagccaagattgtgccactgcactctagcctgggcgacggtgcaaaaactccgtctcaaaaagaaagaaagaaagaaagaaatccccactggctccccagggctctaagaactcaagccaaagtcctctccgccgcccaaagacctggggctggggatctgactcttccccacctctctgatctcccctactccacctcctttccggcaacattggacccttgctgctcttctaacttgccagcaagcctccactcactcggagcctctgtctggatccttcttgcactcaggcatcagctgggtcattcccatctccaagaggcctccccggcatcttccctctcccaggcactttgaaggacatggaacttgctctgggacatttccttgttcaggagctgatcagtcactgcgagcctcgggttcagtggagcatcagctccaccaggacaaagatagttttctgtcttgttcacagctgtcttctcagagcgaaaaacagggccttggcctggcgcggtggctcatgcctgtaatcccagcactttgggaggctgaggcaggaggatggtttaagcccaggaggtcaaggctgcagtgagctatggtcccatcactgcactccagacgaggcaacagagcgagaccctgttttgctttgttttgttttgagacagtttcgctcttgttgcccaggctggagtgcagtggtgcaatcttggcttatggcaatccccacctcctgggttcaaacgattctcctgcctcagcctcccaagtagctggaattacaggaatgtgccaccacccctggctaatttcgtatttttcatagagacagggtttcaccatattggccaggctggtctcaaactcctgacctcaggtgatccacccacctcggcctcccaaagtgctgggattacgggtgtgagccaccgcgcgtggcccctgttttttcggtttgttgttgttgttgttgttgtttttaaaaaagaaagaaaagtaaagaaagagagagagaaagaaagggagagaaagaaggagggagagagaaaggaaagagagagaaatagaaaaagaaagaaagggagggagggaaagagaaaaaagaaagaaggaaggaaggagagagcgagagagaaagaagaaagaaagaaaagaaaagaaagaaaaagaagaaaaaagaaagagaaaaggaaaagagaataaaagaaagaaagggcctgacccactggagaggcttgggaactgtctgtggggcacacaagtgagcagaagggtggacacatggatggacaggcggacagacaaactgaaacttcatcctacacgagttagaggtgagagggaaaaggcagcatggactagggacaaggccaaaggtcctgtcagatggtggccgccaccactgtgtcacccctgtccagggcctgtgaaaggacgtccacccaggctgcagcctagcagagacatttcttcatctcctccccccaggcacttttggccctccccagacttcgggcccctcttctcttgccaagaattaaggctgtggcctcagccgcgcaggaagccacctccagcccccaggtggtctgggactcccaggtctaagacaaaggggacagggaagaggggcagagggaaagattggatgccgggaatcaaccgccctctcaaaatatctccattgcagagactcctaaaggggaactcccctccagctgcgctgggaccccaggaccctgccccggcctgaaggccaggtgagtccattccctaaccctccctggcccactccaccccactccaccctcctccacctggaggtgacctcatctaacccacccctctctccgcctacagggcacccagatgtgctgctcaagggagccccaagggctggaagggggttgtgaaaccgaaataaactgccaagcctggtctgtcctccagggtgcaaaggaagagtgcagtggccagcagggggcagcagagggcagcaggcactgggaaagggccgtccccaggcctggtccccacctgaacaacaggagtccaggccccagcccctcctccctcagactcaggagtccatactccagcccctcctccctcagacccaggagtccatactgcagcccctcctccctcagacccaggagtccatactccagcccctcctccctcagacccaggagtccatactccagcccctcctccctcagacccaggagtccatactgcagcccctccttcctcagacccaggagtccatactccagcccctcctccctcagacccaggagtccatactgcagcccctcctccctcagacccaggagtccatactgcagcccctccttcctcagacccaggaatccatactgcagccccttctccctcagacccaggagtccaggccccagcccctcctccctcagacccaggagtccatactgcagcccctcctccctcagacccaggagtccatactccagcccctcctccctcagacccaggagtccatactgcagccccttctccctcagacccaggagtccaggccccagcccctcctccctcagacccaggagtccatactgcagcccctcctccctcagacccaggagtccatactccagcccctcctccctcagacccaggagtccatactgcagcccctccttcctcagacccaggagtccatactgcagccccttctccctcagacccaggagtccaggccccagcccctcctccctcagacccaggagtccatactgcagcccctcctccctcagacccaggagtccatactccagcccctcctccctcagacccaggagtccatactgcagccccttctccctcagacccaggagtccatactgcagcccctccttcctcagacccaggagtccatactgcagccccttctccctcagacccaggagtccaggccccagcccctcctccctcagacccaggagtccatactgcagcccctcctccctcagacccaggagtccatactccagcccctcctccctcagacccaggagtccatactgcagcccctcctccctcagacccaggagtccatactgcagcccctccttcctcagacccagtagtccatactgcagcccctcctccctcagacccaggagtccaggccccagcccctcctccctcagacctaggagtccaggccccagcccctcctccctcagacccaggagtccagacccccaaccccttctccctcagacccaggagtccaggccccagcccctcctccctcagacccaggagtccagacccccaaccccttctccctcagacccaggagtccaggccccagcccctcctccctcagacccaggagtccaggtccccagcccctccaccctcagatcttcaaatggaatctggggccaggcacggtggcgcacgcttgtaattccaaggctttgggaggccaagtgggaaagactgagcctaggaagctgaggttgcagggagctgtgattgtgccacagcaatccagcctgggtgacagaccgagatcctgtcttaaaaaaagaaaaaaaaaaaaaagaaactgggcccccagccttctctgtgatacccaggagtcctgctctcaggatttagaagtccagaatcccaagttttctgagaatcgggcatccaaccctcctgcttcatcatggcaaaaaaaatccctggacctagacccagatatccaggttaagtccctggtcaaaaggaccacacatttccctgatggttatccaccttgccttgccacggtctgtgctcatccctctctctgtccttcattcctctctgacatctttctcccagagtaactgctaacttccagtctaaatcttgctgaggaagaagagataccacctcatgattcatcttggagtggcccaagcctccctccaccttgtttaaattgccccattcccggagaccttgccctgtgcccagcgctgggctgagcaatgctgaccaggaagcagtgatcactgccccactagggctcaccttccactagaggaaagagacctgtccctagacagtgatgacccagagtgggcatggctggggtagggaatcccagggggctacaggaacccagagtgggcacctgactcagcctgggaggtcagggagtgcttccaggaggaggcgatgtctgagctgatacttaaaagatgatgaggccagacgtggtggctcatgcctgtaatcccagcactttgggagactgaggcaggcgggatgcttgagctcagaagtttgagaacagcctgagcaacgtgatgaaactccatctccacaaaaaattttggaaaaattagccaggcatggtggcacatgcctgtaagtcctagctactcaggaggctgaggtgggaggatggcttgagcctgggaggtcaaggcttcagtgagccgagattgcaccactgcactccagcctgggcaacatggcaagaccctgtctcaaaaaagaaaagaaaattttttaaatgatgaaaaagtattccaat[131 bp omitted]aacatggtgaaaccccgtctgtactaaaaatacaaaaattagccaggcatggtggcgggcacctgtaatcccagctactcgggagactgaggcaagagaatcacttcaacccaggagatggaggttgcagtgagccgagattgtgccattgcactccagcctgggcaacaagagcgaaactctgaaaaaaaaaaaaaaaaaaggaaggaagggagggagagagaggaaaaggaaggagggaaggaaggaaggagagaaagaaaagaaaggaaggaagaaagaaagaaagaaaagaaagaaagagaattttcacagatttagttccaagcaacagatgctacctcaggggcagaaagggaatttattgagaggatttggggtcactcacagaatcccaggagtgaactggggaatcaggattggaaagtgagcaggaagaatcctggcaactggccagcaatggtaacccagccacagtgacaccacggaaccggtctgatgaggccatgctggcgatggccactagacactgtagttgtctcgctgcctctgctgccccagaaataggatatggctgctcttctcattagctgttgctggtaataaatcacttcacaacttagccgcaaatgacagcaatcattgcattaagtctcatggttgctgtgggctgggatttgaagaaaggcgtggctggtttgttttggctcaggatgcaaacaaacagtgcaatcagtgatgcttgccacagggcggctgggggtgctggacaagtgggcatctctctgtggtctcagggcctcccccaccatatagtctctgcactggccagcttgggcttccccacagcatggctgcctcaaggtagtcaaactttatatggccgctgaagacccaggcagaagctgcatggccttttctagctcattttgggagttccgcaacttcacttcagctgaattctgttggttgtatgcaagtcaccaaactgcacagatttgagaggagggtgccatagaccccagctcttgatggaaagagtatcaagctctcattgtggaaacacacatgggatgaaagacactgtcacaacatggcaaaaccccattcctacaaaaaaaaaaaaattaactaggagtggtggtgcacacctgtactcacagctacccaggaggctgaggtgagaggatcacttgagccctggaggacgaggctgcagtgagccatgatcatgccattgcactccaacctgggtgacagagcaagaccctgtctcaaaaagaaaaaagaaagagattgttgtagccgtctttggaaaacagaatctgtcccagctgccatgcatggctggaagaggtggccaattcctgatattcaaaagtgtggaaggatttgccaagcttaagtcaccttagctccaacagatgcaggaaagcaaacatccattcttgttggcttcaagagtgggcaacagaggctttcagacagtaggaatttccttaaatgtgggaaggagctgcagatgctaggtaatccttcccgcaaaatatgtactatagcccgctcctttggttttttttgttgtgttttgttttttagacaaggtctcactctttcacccaggctggagtgtagtagcacgatcttggctcattgcagccttgatctccccagttcaagcgatcctcccacctcagcctcctgagtagctgggactacgagcacaaaccaccaccacccccggttaatatgtattttttgtagatacagggttttgccatgttgcccaggctggtcccaaattcctgggctcaagcgatccacctgcctcagcctcccaaagtgctgggattgtaggtatgagccaccacagctggctttgaatgttcaatatcaataggccctttgcagaagttcttatcgaaactttccccgcacaaccgtctctcattgtacaatcaaaaaatgcattcacactgccacccaatacaaaaaatttcaatagttccattttccagatctgagactggaatcagggaagaaccattcccctccaaatatgtcattctccccatattccacaagctgtgagctagttgtaaagttaatcgtcacacactgtgtgaaaaataatgggaaaaaaggtcaagaaaagataagtcagccaggcactgtggcttccgcctgtaatcccaacattttgggaggctgaggctggtggatcacctgaggttaggggttcgaaaccagcctggccaacatggtgaaaccctgtctctactaaaaacacaaaattagccgggcatggtggcgcatgcctgtaatcccagctacttgggaggctgaggcaggagaattgcttgaacctgggaggcggaggttgcagtgagccaagatcacgccattgcattccagcctgggcaacaagagtgaaactctgtctcaaaaacaatgaaaaggtaagtctggccaaccgtggtggcccacacctataatcccagcactttgggaggctgaggtaggaggatcgcttgagcccagagtttcagaaaagataagccttgttagttaaaatatgtgaggatatacacctgcggccgcatggatggaattagaactttttttttttttttttttttttttgatactgagtctcgctctgtcacccaggctggggtgcaatggcatgatctcagctcactgcaacctccacctcctaggttcaagcaattctcctgcctcagcctcccgagtagctgggattacaggcacctgccacaacccctggctaatttttttattttaagtagagagggggtttcaccattttggccaggctggtctcaaactcctgacctcgggtgatccacccacctcggcctcccaaagtgctgggattgcaggcatgggccaccatgactggccatttttatatttttttgtagagacggggtttcgctatgttgcccaggctggtctcaaactcccgggctcaagcagtcctcccgcctcaggctcctaaattgctgggattacagacgtgagtccctgcggctgacctggacctcagcttttaccctaagtgagacagaagtcatgggaggaccctggggcagaagagtgacatgagttgattcacatgtaaaaggaatccttcaggctgttttgtgagaataaattacaggggacaaaggcagatgatgttacaagactagtttctgcaagtctgcaagggtccacggctgctgttttggtgtttctgacttttctccttcatacacatgccatagagttctcctccctcacccagaacctcagatggctaggttcttcttttttttttttttttttttgagacagaatttcactcttgttgcccaggcaacatcgtgcagtggcacgatctcagctcagtgcaacctccacctcccagattcaagcgattctcctgccttagcctcctgagtagctgagattacaggcatgtgccaccacgcccagctaattttgtatttttagtagagatgcggtttcaccatgttggtcaggctggtctcgaactcctgacctcaggtgatccacccacctcggcctcctaaagtgctgggattacaggcatgagccacagcgcccagcctcagctggctgggttcttgagggaggtggaagtgggcgatggctgctgagagggcatgtaccagggtccagcccaaacagaaggtgcacaggctggggacagaagagctagggtatgggtgtcggtgctcacagtgtgtgagcttgacagcacctgggactgtcttggagtgccgccgcattccccatgagtgagtttgtattgtatatcctgggatgctccagtctggatggaatctgcacgtgagtttgtgtgccttgcaaacaaaccttccctgagcacctgcactgtgtctggtcttgtgctgggcggggtgcccaggggaggagcccttagctcaccacagtgatcaagacatccctggccctgccctcacaggctcacagtccactgagggagacagacctatccccagccagggacccccagagtgtgccgggctcaggtgggggagcccagagggggaacctgacccagccagggaaggcagaggggacttcctggaggaggggatggtacagttaatcctaaaaggtctttcccaatgtaacagttgctctgtaggatggatgcagtggctcatgcctgtaatcccagcactttggaaggcaggaggatcacttgagcccaagagttggagaccagcctgggcaacatagtaataccctgtttctattaccaaaaaaatacaaaaattagctggacatggtaacacaagcctatagtcccagctacttgggaggctgaagtggaaggattgcttgagcccaggcggttgaggtttgaatgagctatgattgcgcccactgcattcccggctgggcaacagagcgagaccctgtcaaaaacaaaacaaacaaacaaaaaaaacgttggtctcctgtatgaccaatggataaagtaaccttgaccagtctaataactcccaggctgacctgtaatccaagccttctctgtatgtctgagcaggcaaagcccagctccagggctacctcaacccccaggctgatcagaagcttgggtaacctctcccagtgtggccagcgaccccccaccctcccacgttctgaccactgtcctgggcaactagtgacatctagtgggggattttgtcccagtctgacctggcctgtaggggccttgggcagtcggacctgtgacccacgcttcctagcagtggctggactcctcccccttcccgcaggtgccctggcctcttcccctgccctcctcacctgctctggccagtctgactcctcccttccccacaaggttgggagggaatgaaggagagagcgggaaggaggaagggagggtggcattcctgggattccctggatagggggaagagtgggagggccttccatgggtgagcaagcagagagggcaccccgtaccccacccccagccccatcatcgaagcggcctaggaggacctggatttgaagaccattgaaaataagagattaaaccggttgattccaggctactggtcagacgaggaaagcagcccagagcactgaccacaggggaaaacatctccgggcatactgggagcagctgctgggggccactggtcaggctgcgggggtcactggttggactgggagaggccagtgcaggccactcggacggcacgcttggggccattagttacactgggagaggccatcgcaggccacaggttgcagtggggtcctctggttaaaatcgacgatgccagcccaggctgctggtcacagtggggacgagtccccaaggcccctggtcagaataacgaggagaaggtccgcgattgcctggtgagatcccagctcgggtcactggctacgctggtcgatcaggccccccgctgcaggcgctggtcagtaagcccggacagctctaggcttgggggcggacgagccccgagcctggccccgtgcactgggaggtccgctccgggcagtgggaggtcctggccccgcgcccgggcatcgggggacgaggggggcctggagggcggggcggggcggggctgccgggggcggggcctctggctcccagccccgcagcggccgagctgcagcccgggctcagtctccgccgccgccgtgaacatggagcccccggacgcaccggcccaggcgcgcggggccccgcggctgctgttgctcgcagtcctgctggcggcgcacccaggtatggctcgggctgagggcaaggtgggactggggagaggcccctggggaccccgggaaagcgaggagaaagggctttaccctgaccccaggaagcaaaatgtggggaccccaaggaggagggatatgggagtgttggaaggtacgccttccagtgagagagatctggggacagccaggcaggagagctggggatacccaggcggtggatcagagacaaccagagaagtcagcccccttcccactcagcaccctggaatctgggtcccacctgcctcctccctcagaccctggaatctgggcccccagcccctctttcctcagacccaggagtccaggcctccagtggctagaatagcttcccccagggcacagaggatcaaaaccccagggctctctccctcaaaggtcctcaagttttgagaggtccagggaccccttagagaagcgaggaccatgtgtccccacaccagcgatccacatgtatttaggagtttccagagtccagtataaagaacccgcctccctcaggaaagggctggagcaccagccccgggcagtgacagtggaacaaagtgtttccaagtgacaggcccccttcctggggcctcagctacatttacacacctgcatgaggatagaaggagaggaggccgggggctggggggtgggggtgggggtgctggggacagagggacagagagatgagagagattggggaagagagaggaactctctgcctccacttgtctgcagatcagacccagccttaggcaccagcctggaccccgtcacccctccctggggacaggctggggccagaggtgagcgcttgggaatccaggcccctggcacactcatggtcaacagtgggtccccaggggtagggctgggccagattgagcagagaagggaagggagtttctaagaagcactgagagctgatgccaggatgccagcccagagggtgagggagggtggtggtttttctacaataactactccaccaggccccagcctcctcttccctctgatcccaggagtccaggtgcccagcttcccaagatcctgggcctcaaccttatccttttgcaagatgactcgacttatcccgtttgctgttgtatcaaactgaggggggccaagaggcggctgggggctctggctccaggccgggcaggtctcagccagcctgtccctcccacattcctgaaacctgcccagccctgtcccccctcaccgcccccacacatccatcccgcctaagctccgggcccagccgcagcccacaccccagcccctcactcatgggagagcggaagagacccagggactgagtggtgcaggtgcagagagaggcagagacagggacagagatggagacccaagaggagagacacacgcaaaggtggagaccaggatggagagaaacatttatccatcatcacagaggtggccctgcccagggtgctggaggcaaatggctgagccaggcctggccctgccctggggggtggcgtgtgctctgttgggataagcaaaggctggtgcagtattaccccaggagtgttcagcggaggccacagggccctgtgcagcccagaggaggagccctgagctctgcaagtgcagggagagatggatttgagacccagagatgcagggagaagggatggagggcgaaaggatctcagggaggaggggctggggcctagactcctgggtctgagggaggaggggctggggcctggactcctgggtctgagggaggaggggctggggcctagactcctgggtctgagggaggaggggctggggcctagactcctgagtctgagggaggaggggacaggggcccagattcctgggtctgagggaggaggggctggcacctggactcctgggtctgagggaggaggggctgggacctggacgcttgtgtcctgggggagaggggaccctgtctggagggctcttcctgttggtgtggtggatgatagctcagttgctctcttgcagatgcccaggcggaggtgcgcttgtctgtacccccgctggtggaggtgatgcgaggaaagtctgtcattctggactgcacccctacgggaacccacgaccattatatgctggaatggttccttgtgagtgcttggggctggggggcctggagtcagggcacagcagggcagcaaaggttcattctctcatcagtgcctaaggcctgtagagatccaccaagccacactccttgttacagatggggtcactgagtcccactgaggggaagggatctgcaaggtgccccgtgtctaggcacagccaagtctagaatgacattgacctgctctggactgcggg[222 bp omitted]gaggcaggagaatcgcttgaacctgggaggtagaggttgcagtgagccgagatcgagccaatgctctccagccaggcgacagagcaagactctatctcaaaaaaaaagaggaaagaaaatgagagacaatcgggagagggagagaccaagaggagaagggatgggaccggaatgagatggagaaaaggagacaggaaaaatcaagaactgatagggaatgggggcaggagaaggtggggagggacagagggaccagggagacccataacaagaggaaaagaggcagagccaggagctgcagagagaaaggacccagagagagagagactgaggagcgctgggacacccggagctgagagcctgccccgcgcccacagaccgaccgctcgggagctcgcccccgcctagcctcggctgagatgcagggctctgagctccaggtcacaatgcacgacacccggggccgcagtcccccataccagctggactcccaggggcgcctggtgctggctgaggcccaggtgggcgacgagcgagactacgtgtgcgtggtgagggcaggggcggcaggcactgctgaggccactgcgcggctcaacgtgtttggtaagtgtcctcgggcatcccccgaagggaggcaggcagggaggggcgcagggcaggggctcctgacgtgaacgtctttttcacagcaaagccagaggccactgaggtctcccccaacaaagggacactgtctgtgatggaggactctgcccaggaggtacctctcgggtggaccttggccccagggtcctggaggaggaggggacagggccctggactcctgggtctgagggaggaggggctggggacccctgggtaataaaggaggaggggtaaggccaggcgaggtggctcatgcctgtaatcccagcattttgggaggcagaggcaggcggatcacctgaggtcaggagttccagaccagcctggccaacataatgaaaccccgtctctactaaagatacaaaaattagctgggtgtgttggtgtgcaactgtaatcccagctgctcgggaggctgagacaggagaatcactcgaacccagaaggcagaggctacagtgagctaagatcacaccactgcactccagcctgggccacagagcaatactccgtctcaaaaaaaaaaaaaaaaagaagaagaaaagaaaaaagaaaggaagggcagagggggaagactcctgtgtcctaggaaggagagagctgggggacccagaatccttggtccctggaggatggtgctggaggcctggactctttagtctgagtcggggactaggaatttggactcctgggtcctgggagagtcgggagttaggagcccggctcatgagtctgagtggggagaactcctgagagaggagccccgacttcagagtcccagctccaagcccagggccatgcccgtgtctgcctcagatcgccacctgcaacagccggaacgggaacccggcccccaagatcacgtggtatcgcaacgggcagcgcctggaggtgcccgtagagatgaacccaggtgagcagcgcaggagcgcggcgggacgtgggctggggtgggtggcggggctatggcctggctgactgccacctcccccgatctctcccagagggctacatgaccagccgcacggtccgggaggcctcgggcctgctctccctcaccagcaccctctacctgcggctccgcaaggatgaccgagacgccagcttccactgcgccgcccactacagcctgcccgagggccgccacggccgcctggacagccccaccttccacctcaccctgcactgtgagtctgtgctggcctttgacctctgacctcaggctccacacctcatgaggcctgaccctccacccgggggcttcacactcccctctgaccctctgcctccctacttcatgctaaaaaaaaatgtgctagtgctggccactgacctctgacctcaattggtcgcacaagccccatcctgacctctgacctccgacctccacttagcaccctggaccccatgaagtttatgactaaatggtgctttccaccttctcacactgaattgggtccccccatgacatctggctccaagtctcacactgacccatcgcccatacggacctctgactcttgacctatactcttagtttatttcaacctctgaactctggcactcagaataattgtgaacctgaggcttgaaacctatgacccgtaacctttgacccgccatagccctcacctgggatgcagggctgacctctcgcctgtcctctagccttgacccttcccctgatcacaattcccatctccctgcccttcccttagatcccacggagcacgtgcagttctgggtgggcagcccgtccaccccagcaggctgggtacgcgagggtgacactgtccagctgctctgccggggggacggcagccccagcccggagtatacgcttttccgccttcaggtgacccacccaagggtccctctgggatccaccccccagcccctgacctctgtgacctgctaacctgcataacttctaatgtgggacctgggagtccccatggcttaggcagccacctgatctggtggcccacgaactaaaaggacctctgacccctgatttgagagagtcaggacttagcatgccacctgacttgatggcccctgacccctgattctggcttagcatgacactaacctggtggcttctgacctagcatgagcccgctgaaccggggtggcttctgagcctggttcctcgtcccccgtctcccaggatgagcaggaggaagtgctgaatgtgaatctcgaggggaacttgaccctggagggagtgacccggggccagagcgggacctatggctgcagagtggaggattacgacgcggcagatgacgtgcagctctccaagacgctggagctgcgcgtggcctgtgagagccctgggtgaacgggcgggcaggaggggccctggcatcagtgcctctgcgccctcctccctacagccctgaagttgctctgtcatcccaaacactctgccttcaaccctttctctgcatttcttgggggtttttttggttgtttttttttttttttttttcccagagacaggacctggctacgttgcccaggctggtctcgaactcctcatgcgatcctcctgccttgctctcccaaagtgctgggattacaggagtgagccaccgcatcttgtcgagagctctttccatagcacagacctgaccctcctctgctcagaatctgccatggctccccagtacccttgggagaagcccaggtgtctcaccatggccttcaaggtccacctggccagttccaccattagctagctgatccttctccccagtcaaggctatctcctcatcaccccccaggctcctctggttcctaccttcactgcccatccttcctaccgtctatttctcaccaatcccttgaatcccaggcttctaagaatgattttcagttcattcgcatccaggccctggggaaaggctgtattctcccttggcacttcttacatatcccttcctggggtagaccctgcgccagatgctggggacacatctgtgaacaagacagaccacccctgttatttcagtaggggagacagatggtaaatgctaactaagccctttcgtaacagtagtgtatctacaggtgatatcaccagtgagagagagcaggagaggggattattttaggtggcaggtgttgcagtctgctttcctgagaagcagattctgacttggatgttttcaggcaagaagtttatgggaagtaccctgggttccgcacctcttgggtctagggaggtaaaggaagcaagatttggcaaggtgagaagttggactgaagtctaaggaaggtctcaggctgggtgcagtggttcatgcctataatcccagcactttgagaggctgaggcaggaggattgtatgagcctaggagtttgaggccagcctgggcaacagagggagaccccatttgcacacacacacacacaaattaaaaattagccaggcatagtggcacacacctgtagtcccagctactcggaggcccaggtgggaggatcccttgagtctggaaggttgaaactgcagtgagccaagattgtgccactgcactccagcctgagcgacagagaaagaccccgtctcaggaaaaataaaaataaaaaagtaggccgggccccgtggctcatgcctgtaatcccaacactttgggaggccgaggtgggtggatcacctgaggtcaggagttagagaccagcctggccaacatagtgaaaccccctctgtactaaaagttagccgggtgtggtggcatgcacctgtaatcccagccactcaggagcctgaggcaggagaatcgcttgaacccaggaagcggagattgcagtgaactgagatcgtgccattgcactccagcctgggcaacagagtgagactccatctcagaaacaaataaaagaaagaaagagggcctcagtcagccccacggggtacttggaatccaggatggcccttcacagttgtccccagttggggtgagggggctgggccttaataacctctacatcaaccagtcctcagaggtgtgctggccttaggcaaggggctctcagcagctgaggcagctcccagagaggggtgacagctgcaggctgacagctgtcatccttcttagcagctggtggaataagtccttccgtgctgtaggaaagatctgggtgtccacaataggggaggtcagggaagcctctgagaagagaca[132 bp omitted]gaaaccccatctctactaaaaatataaaaattagccaggcatgatggctggtgcctgtaatcccagctacccaggagactgaggcaggagaatcgcttgatcctgggaggcggaggttgcagtgagctgagatcgtgccactgaactccagcctgggtgacagagcaagagtctgtctcaaagaaaaaagaaattggccgggcacggtggctcacacctgtaatcccagcacttttgggaggcagaggcgggcagatcatgaggtcaggagtttgagaccatcctggctaacacggtgaaatcccgtctctactaaaaatacaaaaaattagctgggcgtggtggcaggtgcctgtagtcccaggtactcgggaggctgaggcaggagaatggcatgaacccaggaggcagagcttgcagtgagctgagatcccgccactgcactctagcctgggcgacagagccaaactctctcaaaaaaaaataataagaagaagaaatgcagagagctacaaaaagagcactgcaagtagagtgagcaagtgcaaaggccctgaggcaggccccaacttggtctactcaagaaaaacagcaagagaacggggtagctgggagcacaggaggaatggggaagagtgggagatggttcaagaggtgggtgagggccagaccaggcagcatcttttaggcaccctcaagaagtttggcctcgatgccaagggtactggggagccactgcagggttttatgcagaggggagggatgaccagtgggtggttggttttttttgtttttttttttttgagtcagagtctcactctgtcacccaggctggagcgcagtggcacaatctcggctcactgcaacctccacctcccaggttcaagcgattctcctgcctcagcctcccaagtagctgggactataggcatgcaccactatgcccagctagcttttggatttttagtagagatggggtttcaccatgtgaccagggtggtctcgaactcctgacatcaggtgatgcacccgcctcggcctcccaaagtgctggggttataggcatgagccaccgtgcccggcctgaccagtggatgttttaaagaggtccctctagctgctcagtggaggatggacaagagggaggagcaggctagtgaagaggtggttgggacagtcaaacctggggccagaggtggcaggaagccagaggatttgtcctgggagcagaccagataaagacttgctgaggccaggagcaggggctcacgcctgtgatcctagcacttttgggaggtcaagacaggaggatcacttgaggccaggagtttgagacccagcctggccaacatagcaacaccttgtctctattcaaaaacaaaactttgcagaaaagatgtttgggggtaacagggaggttaccccacaggttggggtttgagcaaaaggtttgtgtgctaaagtcacagaagggacaccttccacacctaaggttattcattaaccttgggctcagatgtcagctctgaagaaaagtaattgacttgggcatgtcaatgttggggttagactgctagatttttggttggagagcctggatgggagaatggagatttcatggagatggggtaaaccaggaggattacttgctgttctctgcttccaactgtccattcatgtttgcacccccgaccgcccctggagagcccctaattgagtgggtggcggtctgggacgagtgacagactgtcccccactgcagatctggaccccctggagctcagcgaggggaaggtgctttccttacctctaaacagcagtgcagtcgtgaactgctccgtgcacggcctgcccacccctgccctacgctggaccaaggtgagagggagaggagccccctcgggccctgcactcgcaccctcctctctcccctcactcctcgccctctcacagcgtcctcctcctcctctgcccttcccaggactccactcccctgggcgatggccccatgctgtcgctcagttctatcaccttcgattccaatggcacctacgtatgtgaggcctccctgcccacagtcccggtcctcagccgcacccagaacttcacgctgctggtccaaggttcagggggcagggagggggtgggcttggatggggacagtgtggggtgtgggacctggacaaacaggacgagttcctgagtccctggctggggactccatcttctgctcgatgcctctcttctctctctctctcctctcccttcactttcttcccatccccaccacccacaggctcgccagagctaaagacagcggaaatagagcccaaggcagatggcagctggagggaaggagacgaagtcacactcatctgctctgcccgcggccatccagaccccaaactcagctggagccaattggggggcagcgtaagggaccttcctctccaccctgagccccctctcactcatccaagtatcacaccctcctttccacttcctgggagactggacgtcgttcacctctgcccttgaccccaccccttgaccccaccagccggggcctgatcggagcctccatagcccgcagagccaatccccggacggcagggttgggtgagcagctctctgaccctgaaagtgaccagcgccctgagccgcgatggcatctcctgtgaagcctccaacccccacgggaacaagcgccatgtcttccacttcggcaccggtgagtgactgaggtggtggcagaggagccgggtgtggggcagacagagcccactgcctgacccacgcctctctccatcctgtccctgcagtgagcccccagacctcccaggctggagtggccgtcatggccgtggccgtcagcgtgggcctcctgctcctcgtcgttgctgtcttctactgcgtgagacgcaaagggggcccctgctgccgccagcggcgggagaagggggctccgtgagtggcctgctatctgcaatgaccaccatagcttaaccccatccccaccctcaaccccaagctcaacccataacctcaaccacatcttatcctccaccccacatcccaccacatccacctccatccccaacccatcctcatccccaactacagccccaaacccagccccagactaatccacagccatccccaactcatcctcatccccaactgcagccccaaacccaacccagggccatccccaaacccatccccaagccaaactcaacaccatccccttccctaatcacctctcctgcccctagctcagcctcatccccaactccatgcctgtctccaatcccaaccctgcccccaatctcccctcaactccaatccataacccccttcaaaccatcctcaactaagctcctctccagccctggccacatccccatcctcccccaacctccagccccaacacccatcatccccctgagctcacccttaactccaatttatcctccaagcctatctctcaccatccagccctcacctagccatttcccaaccctagtcctccaccgtcccgaagccaacttcacccatgtccccatccccaatcttgtccccattcctgactccaaatccaacccctaagcctccccaagctcctcctcatctaaccttgtctccagccccaaccacatggccgtcctcacctccaatccgtaaccatcccagaccgatcccaaagccaactccagctacattcccacctccaaccccaatagcatctgcatccccatgcccaaccctaaccccagtgccattaccagcccctaccccatccctatgccatccccacccagcacacccccatcctcacctccatccccagccgcatcctagtcccacccacccccatcctcagttcctccccctgccgtgtgcacctccaacacgacgcctccgcccgctgcctcctccccccaggccgccaggggagccagggctgagccactcggggtcggagcaaccagagcagaccggccttctcatgggaggtgcctccggaggagccaggggtggcagcgggggcttcggagacgaggtgggtgagggcctgggccccctggtgagagggacctgctgggcagtggagcacgcccgtgggcacaggctgacctctccatccgctccccagtgctgagccaagaacctcctagaggctgtccctggacctggagctgcaggcatcagagaaccagccctgctcacgccatgcccgcccccgccttccctcttccctcttccctctccctgcccagccctcccttccttcctctgccggcaaggcagggacccacagtggctgcctgcctccgggagggaaggagagggagggtgggtgggtgggagggggccttcctccagggaatgtgactctcccaggccccagaatagctcctggacccaagcccaaggcccagcctgggacaaggctccgagggtcggctggccggagctatttttacctcccgcctcccctgctggtccccccacctgacgtcttgctgcagagtctgacactggattcccccccctcaccccgcccctggtcccactcctgcccccgccctacctccgccccaccccatcatctgtggacactggagtctggaataaatgctgtttgtcacatcaacaccatcctgtggccagagcttcctctgggagtagggaggggaagggcgatgcaggtgattccctgctctcagctgcccccccatccgcccccttgcaagacctcagaagacgcctgatgtcatggagaaagaaatgagacagggctgggcgccgtggttcattcttgtaatcccagtggtggtggctcacgcccgtaatcccagcactttaagaggctgacactggagggtggcttcaggccaggagttcaagaccagcctgggcaacatatggagaccccatcgctacaaataataatactaataatacagaaattagccaggtgtgcctatagtcccagctattcaggaggctaaggtgggaggattccttgagcccaggaatacgaggttacagtgagctatgatcacgccattgcactccagcctgggtgacaaagcgagacttcatctctaaaaaaaaagaagaaaacaaaaagaggccaagctcagtggctcaaacctgtaatcccagcactttgggagaccaaggcagggggatcactttaggtcaggagtttgagaccagcctggccaacatggtgaaaccccatctctactaaaaatacaaaaaattagccaggcatggtggcgcgagcctgtaatcccagctacgtgggaaactgaggag[134 bp omitted]acgcagagggcgacttagctggccgggggtggacggaaagatgccaggtcccgagggtgctgggcttggcccccgaggaccagcgtctgcctggagatgggtgctgtccccttaagtaaaagttcccagtctgtcttgccagagccccagagggaattgaaactgggcgaggaaaagctccctcttagctgtagagtcaatagaattagggatggagccacctcctctggggaggagtccctggggaaagcggggagcttggaggaatccagagaaaagggggcctggggcagagaggacacacagacattacaaggccaagaaagagggacgtgagaaagggatggaaagatttagggggaggcaagagggatgggttgggaagctccgagagagccctggagtaagagacaaaaatagatctggggagacagacaaaaagagtagtgggccaggtccagtggctcatgcctataatcccagcactttgggaggctgaggcaggaggatctcttgaggccaggggtttgagaccagcctgatcaacataccaagaccccatctctacaaaaaataaaaaattagccgggcatggtggcacacgactgcagtcctcagcacaggcaagaggatcacttgaggccagcagttcaagaccagcctgggcaacatagtgagaccccatctctacaaaaaaataaaaaattagctgggcatggtggcaaacacctgtggtcctgcactttgtgtgaccaaggcaggtggttcacttgaggccagtagttcaagaccagcctgggcaacacagcaagaccacatctctacataattttttaaagagaaatacagagaaagaagaactggagttagagagatcattgcagttggaaagggagagaggaaatgcaagcagctgcctagaaggacggaggagggtagcgggaggtcagcacgggtgactggctggcgacctcacctctctgagcctttcttgtgcatcgaatggggatcaattgcactttggccacggcgggctgctgtgaggtgtcagtgtgatcttagagccatgtggggtgatgggggcattgcactcacacaccacccagggcctcctagcattgccttctcaaatctcaggcacgcagctccactctctgctctcagtcacctcagccacaaagtggacagagtgggatctgtcaccataggaaattattcggatgccacagaagcctccttcctggtaggtaaaccaagcagcctgcccaggcagaagagctcatgggccacgttaaggcgctcagatcccatggtttattgaattcatttaaaacaaacacaaggttattgtttgtttttcaactgtgtggtggtaggaagtgctcctgacggttttcccatggcaataatttactccttgatttcacccaccactactgtgacagctttctctcactgattcacccaaaagtgggcttttctttgtcattcattcttttttttttttttttttttgatggagtgcagtggcaaaatcatagctcactacctcaaactcctaggctcaagtgatcctcctgcctcagcttgctctgcagctagacccacaggcacatgccatcacacccagctaaatttttatttttattttttgtagagacaaggtctcaaactcctggcctcaagcaatcctcctgcacaaagttttaggattacaggtatgagccaccatacccagcctaaaaaaaaaatttttatttttttatttttttgagacagggtctcactctgtcacccaggctggagttcagtggcaagatctcggctcaccgcaacctccacttcccaggctcaagcgattctccagcctcagcctcctgagtagctgggtctacaggcataagccaccaactcctggctaatttatgaattttttgttgagacggggtttcaccatgttgcccaggctcgtcttgaacttgagctcaaaatgatctgcttgccttggcgtcctaaagtgctgggattacaggcctgagccactgagcccggcctctaaaaaactttgtattaacaactttcttcttccaaaaaacctgcagttcccactcttgtcaatgtgtgtgaggtgcccattactccatactttggccagcacttgcaattatcctctaaatttttgcctacttgatgggtaacaaaatggctctcatatttgtgtctctttttttttttttgagacggagtttcgctcctgttgcccaggctggagtgcaatggcacaatctcggctcactgcaatctctgcctccttggttcaagcaattctcctgcctcagcctcctgagtagctgggattacaggcacccgccactacgcccagctaattttttgtatttttagttgagacggggtttcaccatgttggccaggctggtcttgaactcctgacttcgtgattcacccacctcggcctctcaaagtgctgggattacaggtgtgagccactgtgcccggcctaatttttaggcggggtttcaccatattggtcagtctggtcttaaaactcccgacctcaggtgatccactcgcctcagcctccaaaagtgctgggattacaggtgtgagacaccgtgcctggccgataatttggtcttgaggtccctttcatgagcatggccatagactctggctttgccctgcctgggctccaggggattagatcataagtgtttacaatgtgcttttcagcagattttcctttatcctggcaggcagcccaatgcctaagtgtctgacttgtacacaggtgtccctctcacaggaaatgtatttatactggccaagaccctttgtggctcttatctgacctgtgtccagtttattccaaaccaggaaagtcattaggttcaggtgtgtcagtcaagtgacacacacaaaggaggcaactcaacaaaacacatgaaatatcagaaagaggcagggtgcagtggatcacgcatataatcctagctcttcaggaggccaaggcaggaggatcacttgatgccaggagtttgaggccaacctggccaacatggcgaaaccctgtctctactaaaaataaaaaaattagccgggcgtggtggtgtgcgcctgtagtcccagctactcaggaggctgaggcaggagaaccacttgaacccaggaggtggaggttgcagtgagccaagatcatgccactgcactccagcctgggcgacagagggagattctgtctcaaaaaaataaaggaagaagaaataacagaagcagaggctggacatgatggctcacacctgtaatcctagcactctgggaggccaaggcaggaggatcagttgaactcaggagttcgagaccagcctgtgcaacatagcgagaccctgtctctatttaaaaataaaaaaagaagaaagaaagatataacagaagcagtttattacttatggatcccagagagaaaagagcagcacacttccctgggccagtgggaagggggcagctgcctgagacatgcaggctcaaccagcaggtggagagagacccccccaaagcctttactgcggtccagggcatggcggagacggagttccccaggagagttctaactgatgggtttagaacaagcaggcacaagaattccatagagacacactgtgatggaggttgtcatatctgcacagtccattcattggaggtgtggggatcagtagcttgggtcaagtagtttgtatctatctagctgtcccatacagagatggtcccatacaggaggaggtgagataaagctgataccttgatcaactccagtaagaaactggaaggagagccgggcatgatggcttacacctgtaaacccagtgctttgagaggctaaggcaggaggattgcttgaggccaggattttgagaccagcctggacaacataatgagaccctgtctctaaaaaagaaatagagagaaggaagagaggcagggagggagggaggaaggactgggaggaagtatagagctggaaactgtgtcaaggataactaagtccagattttggcatgagaaagttaaacatattcagaatggatgctaagacaatatagaattatacaaattcaccacaatggcatattaatttgttttcatttgaatttccgtgacctctagtgtgaaaatggtgtttctctgtatgttcattggccatttgcttttcttgtttatgaactgtggtatactcttgcctacttttctctttttttttttaccttttcttattaatttgcaggatctctctacacaccaggaatattaacctctaatcttataaagcttttatctcaggctgggtgccgtgactcacgcctgtaatcctaccactttgggaggacgaggtgggtgaatcacttgagtccaggagttcaagaccagcctggccaacatagcgaaaccctgtctctactaaaaatacaaaaaaatagccaggcagggggtagccaggcatgcctgtaatcccagcactttgagagaccaaagcagacggatcgcttgagcccaggagttcaagaccagcctgaccaacatagtgaaaccctgtctctactaaaaatacaaaaaattagccgggcatggtggcgcatgcctgtgatcccagctactcaggaggctgaggcagcagggttgattgagcctgggagttcgaggctgcagtgagtcttgattgcaccactgcactccagtctgtgtgacagagtgagaccctgtctttacatagatatagacagatgatgatagatagatgatagatagatagatagatagatagatagatagatagatagatgatagatagatagatagacagatagatgatagatagacagacagatatccacatagatacctcaaacctattatgtcccaaatcgacctccagtctttcctctcgcataaatggtatccctgccctccagctgggtgagcccaaaacttagaatttatcctggattcctccatttcctttacctcccactcacataacccaaaggcacatcccatgggtcccctcccatacagctctctttcctgaccacttatcccccggcttcccatattcaataaaccttttaactctataccctgccacagggcatagagctgcagctagctctttctacaaatggtttcacggccatcagtccaaacatacatcttctttcacctggatcaatgcacttataaaagcaaatgctcaacagcaatctttgatggctctaatactcacatcaattaaaaatttaaacgttacctttcagtcacccttcccatccttttaaagtggaattcctaaatctaaaatggtaaaagttaaaaaaaaaataaaacaccaagctcatatggctctataa[133 bp omitted]cggtgaaactccgtctctactaaaaatacaaaaaattagccgggcgtggtggcgggcgcctgtagtcccagatactcgggaggctgaggca[137 bp omitted]tcaattctctttatttatttatttattttttgagacggagtctcgctctgtcgccaggctggagtgcagtggcgagatctcggctcactgcaacctccacctcccgggttcaagcgattctcctgcctcagcctcctgagttactgggactacaggcacatgccatcacgcccagctaatttttttatttttagtagagacggggttccaccatgttggccggaattgtctcaaactcccgagctcaggtgattggcccacctcggccacccaaagtgccgggattacaggtgtgagccactgcgcccggccaattttttttttttttttttttttttttttttttttttttgagatggagtcttgctctgtcgcccaggccggagtgcagtggcgcaatcttggctcactgcaacctccacctcccgggttcaagcgattctcctgcctcagcctccagagtagctagattactggcgcatgccaccatgcccagttaattttagtagagacagagtttcaccg[137 bp omitted]gctgacccattgctctcatgtatgtttgtttgtttgtttgtttttgagacaggacctggctctgtcgccgaggctagagtacaatggtgcaatcatgacttactgcagcctcgaccttgggctcaagtgatcctcccacctcagattccccagtagctgggactacaggtgcattgccctcaggcccagctaatttttgtattttttgtagagatgggatttcactaagttggcaaggctggtctcaaactcctgacctcaggtgatctgcccgcctcagcctcccaaagtgctgggattatggacatgagccaccatgccctgcctataactgcttttaaacataattttatacttttccaggagcgtcctaatgcatacgtgtactgcgtattctc[133 bp omitted]gaaaccccgtttctactaaaaatacaaaaaattacccaggtgtggtggtgcgcacctataatcccagctacttgggaggctgaggcaggagaatcgcttgaacccagggggcagaagttgcggtgagcagagatcgcaccattgtactctggcttgggcaacaagagtgaaactccgtctcaaaaataaataaataaataaataaataaataaatagcagattagaaacccgtctgtgactcaggttttctcatttctcttagaataaaattcaaactcctacaaaaggctgcgtgcatagtgcctctctctctgccatccctagcttcactttccttgcctgcatcctatcagacagtctgtctctccagcccttgaatattttgtttctttcctacctctttttttctttttttgagacagggtctcgctctgtcacccaggctggagtgcagtggtgtgatcatagctcactgcagcctcaaaccctggggctcaagcaggtcctcccacctcggcctcctcagtagctgcaactacaggcatgcaccaccacagctggctaattaaaaaaaaaaaaaaaaacttttacagatggggtttctctgtgttgactagtctggtcttgaactcctggcttcaagagatcctcctgcctcagcctcccaaagctctgggattacaggcatgacccatcacacctgaccaggactctcaaacttacccttcatttgtcctgaaatctttcactacagatcctcacgtaattcattcattctcatactgcagattttggctcaaaatagcacctagccagaaatgtctttcagactctcttattttaaggagctcttgccccaaacccacccaagttacttccatcatcctaagtattaatacttttgcttgattttgttcttttctagtttctgggttctatgcatagaccatttttactaatattcatattttcttttaaataccttagaaagatattttagatttcttcatttgagccatgcacattctttgaaaatttatcctaaaatagctgggcacccagcccatcccttgaacccaggaggtggaagtggtagtgagctgcgattgtgtcgctgaactccagcctgggacaccgagtgagactccatctcaaaaacaaacaaacaaacaaaaaaatgttgggcacagtagttcatgcctagtcccagctactcaggaggctgaggcacgaggatcacttgaggccaggagtttgagatcagcctgggcaacacagcaagacctcactctaaaaaaaaatgttaatgctaacatataactttggttctgtttgtgattggcatatggtttatattatactttttttttttatttgagatggagtctcaccctgtcgcccaggctggagtgcagtggtgtgatcttggctcactgcaacctccatctaccatgttcaagcgattctcctgcctcagcctccagagtagctgggattacaggcatacaccaccacacccagctaatttttgtattttttttagtagagacagggtttcaccatgttgatcaggctggtctcaaactcctgacctcgtgatccgcccgccttggcctcccaaagtcctaggattacaggagtgagccaccgcgcccagcaaaaagttttttaactagctgagtatagtggcacgagcctgtagtgccagctactcaggaggctgtggcgggaagagggaggctgcagtgagatatgatcgcaccactgtactccaacctaggtgacagcaagaacttgtctcaaaaaaaacaaataacttcggccgggcaaggtggctcacacctgtaatcccagcactttgggaggcagagtcgggtggatcccctgagaccagcagttcaagaccagcctgaccaacactgtgaaaccccgtctctactaaaaatacaaacaattagccaggcgtggtggccggtgcctgtaacctcagttactcgggagactgtgacagaaagatgaaggctgcagagagctgtgatcgcacccctgtactccaacctagatgacagcaagaacctgtctcaaaaaaatagacaaatacataaaataaaatcggagtgaagctaccaatgtaatgttgagtgagtgatatgtttcagaaaatactttctagatccttgatgtttaatacggtatccctagtcatatgtggctatagaaacgtaaactacttaaaactaaataaaatgtagaatctcattcttcagtgacaatagccacagttctactgctcaacagacaattgtggcttgtggttactatattggacagcacagatataaaacatttccatcaatatagaaatttcttttttattctttttttttttttttttttttttgagacggagtcttgctctgtcacccaggctggagtgcagtggggcgatctcggctcactgcaagcttcacctcccaggttcacgccattcttctgcct[175 bp omitted]cccggcccccagtacagaaatttctacagggtaatgcagatctagaatatgatcccattttaaaataaagtccatggccaggcatgttggctgatgcctgtaatcccagcactttgggaggccaatgcaggtggatcacctgaggttaggagttcgagacaagcctggccaacatggtgaaaccccgtctctactaaatctacaaaagttagcttggcatggtgtcgggcacctgtagtcccagctactcaggaggctgaggtgggagaatcacttgaacccaggaggcagaggttgcagtgagctgagatcgcaccattgcactccagcctgggcaacaagagcaaaactctgtctcaataaataaataaataaaataaaataaagtacgtatgtcacatgtgcgtttacatgtgtatatataaatatatttaacaggtttttaatctgttatgtgaattttttaaattttttcatacagtgtcactttattaagtgggtagaaaatg[133 bp omitted]ctcctgcctca[133 bp omitted]caatctgccaaagtgctgagattataggcgtgagccaccacacctgagacacggtttcttaaaacaaaagaaaaaaagagacagggtttcactctgtcacccaggctggagtaaagtagcataatcacggttcactgtagcctcaacatcccagggctcaggtgatcctcccatctcagcctcctgagtagctgggattacaggagcatgccaccacacctggctaatttttgtactttttgtagagatagggtttcaccatgttgcccaggctggtcttgaactcctgggctcaggcaatgcgactgcctcggcctcctcccaaagtgctaggattacaggcatgagtcaccacacctggcataaattattaaatatttaaaattgccaagttccttggagaaactctatttgactacattgtttattttttttaatatgctgcttcataacatctatttatttaaaaatttcttaacatatgatgcagcaactccccttctgggtatatatcagaaagaattgggtcgggcgtggtggctcacgcctgtaatccaagcactttgggaggctaaggcaggaggatcacctgaggtcaggagttcgagaccagccttgccaacatggtgaaaccccatctctactaaaaatacaaaaattagccaggtgtagtggcacacgcctgtaatcccagctactagagaggctgaggcagtagaatcacttgaacccaggaggcggcggttgcagtgagccaagatcacgccattgcactccagcctgggggatagagccagactctgtctcaaaaagaagaaagaaaaggaaggagggagggagggggggaaggaaaggaggaagggagagagggagggaggaggaaggaaaggaggaaggcaggaagggaggaagggagggaggaaggaggaagaaaaggaggaagggaaggaagggaattagaggcgtgagccacagcgcccagcttacattatactttctaacctactaatggcatcaaataaataggaaccggtatttgagaagcacatattataattggaggctgcagtggctcatgcctgtaatcccggcactttgggagacagaggtgggcagatcgcctgagcccaggagttcaagaccagccagggcaatgtggcaaaaccccatctctacaaaaaatccaaaagaattagccaggtgtggtggtatgagcctgtagtcccagctactccggagggtgagatgggaggatcacctagtcacaggaaggtggagactgcagtgagccgtgatctggccagtgcactccagcctgagccacagagggaaggacggaagggaaggaaaagggaacagtgacaaacagagaccagaaacacagagggatgctgaagcataaggaacgaaagacccagagatacagaaatttaggaacacgaagagacccaaagatagtgacagaaacagagagacagaggaaagtctagaaagaaacaatgcagtgacacccagcaccttcatgtatttatttatttacttatttatttattcattcattcatttatttattttttgagttggagtcttgctctgttgcccaggctggagtgcaatggcacgatctcagctcactgcaacctccacctcctggattctcctgtctcagcctcctgagtagctgggattacaggtgtgcaccaccatgcttggctaatttttgtatttttagtagagacaaggtttcaccatgttggccaggctggtgtcaaactcccgaccccaggtgatctgcccacctcggcctcccaaagtgctgggatcacaggcatgagccacctcgcccagccttatttatttatttagagacaaggtctcgctctgtcatccaggctgtagtgcagtggtgcaatcactgctcactgcaaccttaacctcccagggctaagtagtccttctgcctcagcctcccgagtagctgggaccacaggcatgtgccaccacgccaggctaattttttatttttgtagagatgggatctcactatgtttcccaggctggtcttgaattcctgagctcaagccatccttctgccttggcctcccaaagtgttaggattacaggcatgagacaccacgcccgacctcccacatctctctttttttttttttttttttttg[134 bp omitted]ccacgcctggctaattttttatatttttagta[143 bp omitted]tatgtacatatatacacgcatatatatttatatatgtataaataaatacatacatatatatgtgtatatacacgcgcacacacacacacatatatatagaagcttttactttaaagctttgattattgctaagtttattttcattgtctcaagatctgtttaaccctggagccagactgggtcagtgggtctgtgtggtgcctcatgtacctgtctctgccccttgaagttctgtttaccacctccaagaggcatagcctgcagtctcagcaaaaggatagattcccaggaagagtgcgagagaggtttggggcccaggtgggcagcccacccagctgaccccaccaggtgggcatgatatcatgatatcaaatatgctaaatttgtgtctgtgtacatcatgttctggccccagggaaatgagcactttgctggtgaggttggtgacattttgtttaccatctatgcctgaggaggaaagactggaggaaagaaagacctaagaggccagtttatattcacaaacatggaagtcaagcctgttccacctttccaatgcaatagagcacctactgggaaagccatgcctggccagcccctggcaaaacacacctgaggattcattcctccattcacgcaatcataccttcaagaaaagttcagagggcgtggtggctcgcgcctgtaatcccaacagtttgggaagccaaggctggctgatcacctgaggtcaagagttcgagaccagcctggctaacatggtgaaaccccatctctactaaaaatacaaaaattagcctggcattgtggtgcatgcctgtagtcacagctactcgggaggctgaggcaggagaatcacttgaaacttggaggcggaggttgcagtgagctgagatcgagtcactacactccagcctgggtaacagagcgagactccgtctcaaaaaaataaaaagtgtattgagtgtttactgtgtgc[134 bp omitted]aacacagcaagatcccatctctacaaaaaaatttttaaattagccaaacatggtggcacacacctgcagtccccactactcagagtgggaggatcgctcaagtccagaaagtcaaagctgcagcgagctatgatggcattactgtactccaggctgggagacagagcaagatcctgtctccaagacataataataataataataattcacatcctaatggtgttgctggactccagtggggaaagtggtcagtggaattccttagaaggtccacagacctaggaagagacttcaggaactgcaaccaatccctgactctctagggcctgaggaggcacttggatgggaacaccctccacctcccaagagaagcagttgactcctccacgaggaagcactggacagccaggaggtgcctcttgttaaccaaagtgggctgttgaccttgaactccagctcagagatcttgtccctggtcttgttctcaagactcatcaggttctctctttctctggacatggaatctagatcttcaattttgaagccaaatctatgggagtaaaacaaagagatttgattaaaacaaaagatgttgtgcaaaactcaaaaaataaaacaggctgggcgctgtggctcaggcctgtaatcccagcactttggaaggccaaggcaggaggatcacttgagcccaggagttcgagaccagccctggcaacaaacagagactctgtctctacaaaaaatgcaaaaattagcctgatgtggcggtacacgcctgtagtcccagctactcgggaggctgaggtagggggatcccttgagcctgggaggctgaggctgcagtgagccgtgatccagccactgcattccagccagggcaacagagcgagatcctgtctcaaaaaataaaataacagtagtcccagcactttgggaggtcgaggcaagcagatcacttgaggtcaggagttctcaaccagcctggccaacatggtgaaaccccatctctactaaaaatacaaaaattagccaggggtaggggggcacacctgtaatgctagctactggggatgctgaggcatgagaatcacttgaacccgggaggcggagtttgcagtgagccaagatcacgccactgcactccagcctgggcaacagggcgagactccgtctcaaaacaacaacaaaaataaacatgagaagctagatgactgtagctggctgatcacctgcttggcagccacagcttttacctgtgtcttgggcttgggactcatggagcagagtgggtgtcgcccacaggacgcatgaatgcttggagcttactggatccctgcatccctcccatctgtgttcagctcacattcttagtatgtctaacaggtctcatgagttgctttttttttttttttgagacggagtcttgctcagttgcccaggctggagtgcagtggcgcgatctcagctcactgcaacctccgcctcccgggttcaactgattctcctgcctcagccttccgagtagctgggattaccggcgggtgccaccacgcctggctaattttttgtatttttagtagagacaagatttcaccgtgttcgccaggatggtctcgatctcctgacctcatgatccgcctgcctcagcctcccaaagtgctgggattacaggtgtgagccaccacgcccggcttgagttgcttcttaatatccatccttcatttcacctgtctgtgtccttatttatagggctcttgttccctatataacagaattgaaaattccctttaaaaaaatacagcaaatgcacacagaggatcagaggatggaggggagaatttgatgagataaccagggaagtatttagtacaaagcctggcacagagtccatgtgcagtacatgttaattattgtgattatctaaggaaaaataaagag[132 bp omitted]gaaaccttgtctctacaaaaaaaaaaagacaaaaattagctgggcatggtggcacgcgcctgtaatcccagctactcaggaggctgagacacaaggatcacttgaacccaggaggcggaggtggcagcgagccgagatcacaccactgcac[134 bp omitted]ccagcctggcaaacatgatttagtagaaaccccgtctctactaaaaatacaaaaattagctgggcgtggtggcaggcacctgtaatcccagctactcgggaggctcaggcaggagaatcgcttgaacccgggaggcggaggttgcagtgagccgagatcacaccattgtacgctagcctggggggacaagagcgagacttcgtctcaaaaataaataaataaataaacaaataggctgg[138 bp omitted]tggcagacgcctgtagtcccagctactcgggaggctgaggcaggagaatggcgtgaacccgggaggcggagcttgcagtgagccgagatcgcgccactgcactctagcctgggcaacagagcgagactccatctcaaaagtaaaataaaatataataaaataaaataaataaaatacaaacactcccttagtccagggcagggaccagatacagagataccactctaaaggcagacattggtgttggggtttggtgagttggatggcgagtgaacagatggctagtgggaagggaaagagaagaggaaagggttctccatccagtacctggtccccaagttaatgagtggaggatcccagcctgccccaccaggagggaatacatttgcataaggtccctcatctgcatggcatcccagggaatttgcatagagatggcagcctggggccacatcagtatgacccctcctcccaagggttgaaactccagcctacattacaaaggcctagggcaataggaaagtgggaggggtgaacctcaggatctggggctccaggaagtaaagagaagttggtagtaaactacccttgctctttaaccttctgtggttcccagagcatgagccgcccttcagctggcattctggaccttctaagatactgaccctcacatcccctgctcccgctgtcaccaccctcctacctggaatgcccttccccatatcccgtgctgtgacaaagcttgcctattcttcaaagcctggacatcctgaagaattctgaaagctttcaccaccagcccctccttgccctgcccttggaaatttacaaagctctgtgcatctcccagacatgtacagattttttggggtatatagtttattagtaaggttatatttgattgcaaatgactatatatatatatatatatatatatatatatatatatatatatacacacacacacacacacacacacacacacacacatagtctcatacatatatatatatatatagtctatacatatatatatagtctcatatatatatatatgtataccaggagtcatgtctcatgcttgtaatcccagcagtttgggaggccaaggcaggaaaattgcttgagcctaggagttcaagaccagcctgagcaacctagtgagagcctgtctctacaaaaaagtcaaaagatgagtctggcaggccgagcacggtggctcacgactgtaatcccagcactttgggaggcagaggagggcagaccactttaggtcaggagttcaagaccagcctggtaatattgtgaaaccccgtctctaataaaactgcgaacatagccaggcgtcgtggcccaaacctgtagtcccagctacttgggaggctgaggcaggagaatcacttgaacccagggggcagaggttgcagtgagccaaaatcacaccactgcattccagcctgggcaac[140 bp omitted]caaggtgaaaccccatctctac[139 bp omitted]gggcaacagagcaagactccgtttcaaaaaaaaaaaaaaagattattctggcacagtggcgaatgcctatagtcccagccacttgggaggctgaagtgggaggattgcttgagcctgagaggtggaagcttcaatgagccatgattgtaccactgcactccagtctggccaacagagcatgaccctgtctcagaataagagccgggtatggtggctcacgtttgtgattccagcactctgggaggccgaggcaggcaaattgcttgagcccaagagttcaagaccagcctcggcaacaacccaaaaacccatctctacaaaaaaatagaaaaattagccaagcatagtggcacatgcctgtagtcccagctactcgggaagttgacatggaaggatcccgagccagggaggtcatggctgcagtgagccatggtaatgtcaccacactccagcctgagcgacagagtgagaccctgtcttaattaaaaaaaaaaaaaaaagactgaggggaggaagtggttaggggagctgctgctgctgctaaaagaaaggaaaggttgccaggcaggtaaaatacttggcatcagctccatagctccgtcaggaagcctttgcccctacctatgcccctaccttctagtggttatggctcttcagtgaagtgccacctctgggactccttgacactaaaagtcaactccccaggcgggcgtggaacccacccagtcatttgtcaccaaacttggtgctcagcctcatgcttgtgacccaagggtgtgaaactccagcctacacctctggggcatttttttctttctttttttttttttccttttttttttggcagagccttgctgtcacccaggctggagtgcagtggcacaatcttggctcactgcaacctccacctcccgggttcaagcgattctccggcttcagtctcccaagtagctgggattataggcacccgccaccacatcctgctaatttttgtattttcagtagagacagggtttcaccacgtaggccaagctggtctcaaactcctgacctcaggtgatccatctgtctcggcctcccaaagtactgggattacaggcttgagccaccatggccagcctcctggggctttcttcctgggctcatccctgctcacaaagaacagccaggagagagctaagcccactcattcgtaggccaggagaaaggaggtgctagaggccttcctagaagaagacttcctggggactggttcttttgttcaatggataaacgggggtcccaggattttgcaaagcaagttagtagcaaggctggcactaaaacccagaggtcctggtccacaaacctggcctcagattggggagagaaggtcagagagatctaaagcacatttattgccaggcgcgatggctcacacctgtaatcccagcactttgggaggctgaggtgagaggatcacttgagggcaggagttcaagaccagcctgggcaacaaagcg[184 bp omitted]gtggcaggcacctgtagtcccagctactcgagaggc[137 bp omitted]gtagtcccagctactcaggaggctgaggcagaggatcccttgggctgggaagtttgaggttagagggagccaagatctgcactccaacctgggcgacaaagcacaaccctgcctcaaaattaaatacataaataaattaagcacatttatttattttactgttttattttattattatatatattttaagagacggggctctaccatgttgccaggcgtgtcttgaacccctaaattcaagtgatctgccagccttggcctcccaaagtgctgggattgcagacatgagccactgcgcaaggcctatttgtgtatttatttattttagagacaaaatctctctgtctcccaggctggagtgcagtggctcaatcacagctcactgcagcctcaacctccctgggctcaggtgatcctcccacctcggcctcccgagtagctgtagctgctatgcatttattatgtgtgcgcctatttgtccagccatcctcacacccagtttgtgccaagcctgagacacaagctatctggagctcacatggcatggaggttaaaagcacagactggccgggtgcagtagctcacccctgtaatcccagcactttgggaggctaatgcaggcagatcacaaggtcaggagttcgagaccagcctgaccaacatggtgaaagcccgtcactactaaaaatacaaaaattagccgggcgtggtggtgcgtgcctgtaatcccagctactcaggaggctgaggcaggagaatcactcaaacctggggggcggaggttgcagcgagccgagattgattgcgccactgcactccagccttggcaacagagccagactccgtctcaaaaacaaaaagagcacagaccatccgggcccaaaagaagcacccggcctgctatgtgtctttgctgggtggcttggggcaaacaaccaccctgtgcctcagtttacttttcagtgaaatggggatcaccatggtgtccccttcatgggatccctgtgaggaactaactaagagaaataaggtgcttagaagagtcagctctggctctgccattttgtttatttttatttatttttaatttctattttattttatgtttttcagactgagtctcactctgttgcccaggctggagtgcagtggtgcgatctcggctcactgcaacctccaactcccgggttcaagcgattctcctgcctcagcctcccaagtagagacagggtttcaccatgtcggccaggctggtctcgaactcctgaactcaagtgatccacccgcctcagcctcccaaagtgctgggattacaggcgtcagccagggcgccccgccctggctctgccattttgtaactcagtgagtcacttcatctctctgcttcagtttccctatcgcccatggcgctgcatggcttacatgagataatattcgcagtgcacttagatcagtgcctggcacacggtaagtgctgactacatgtattaacagtatcgtaagtgccgggcgcggtggctcacacctgcaatcccagcattttgggaggc[134 bp omitted]gactcaggagaatcgcttgaacccaggaggcagaggttgcagtgagccgagatcgcgccactgccctccagcctgggcgacagagcgagactccgtctcaaagaaaaaaaaaaaaaaaggatcataactaagactcgaatgcggagggataacagcctctgctacttgaaacctagtccttctggggaggaaagcccaggtgtgtggcaggtggaagggagggcgagcctaggtggtcctcttgctagggcaagaagcccccaagcacctgcccccagctgagcagctccgcgcctcctggccctggacgaacttgggcccagactggcgctccgtggcaccccctcccccggcctcccgcttcgcgccctcatcccgccccccggcgcggcctcaccagctccccctgggcagcccaaagaatgcgaagaggtaggtgggggtagggaggagggcgagccgctgggagagacaaagggcccgagtctgagcgagagacacaaagacgcgaggaggctggggagataggggaagtgggacaaggacgcggggagtgaccaggtccggaggccggactggagcccagccccacccagcccggccgggccagcgcagcgcgggggccggtctctgctgccccctggcgggtggctgcggtgagaaggcggcgcggagcaggtgttgggaggggaggaccagggcgcgcagggaggtagggagggaaggaagcagagaacagagcagggacagagagacagcgagagagactcgcacgcagagacaagagacgccgagagggagacacagagaaagagacagggacagagagacacagatagagacagagagagacacacggagagacagagacagagaagcacagagatagagaggcacagagatagagacagagaaacacagagacagagaggcacacagagacagagaggcacagagacaggccgatagagacagagatacacagaaatagagacagagacagagaggcacacagatagagacagagagacacagagacagagtcaaaggatggaaagagacatggggaccaagtgacccagaaacagtgacagacaggccgggcttggtggctcacgcctgtaatcccagcatcttgggaggccgagccgggaggatcgcttgaggccagcctcagcaacatagtgagaccccgccgcccccccgccccgtctcttttattgaaataaagaaacagtgactgacaaaggaagaccagaaacagagcgacaccgaagcatgaggacggaaagacccagagaggcagaaatacagggacagagaggaagacccaaagagagtgagagagacacaaagacacgtaagagagacagagaaatccagaaagaaacgagtgcagcgacacctagagttcggggcagagattagaaacgcacgagggtacgagaaacaggctcagggcgatgggctcgacctgcggggaggtcgcacaaccgggacgtgctgggggcagaaccgtaaagccccacgtgcctcaggcaactgtgatgagaggacccgggcaggcaggaaagggcaggattcgaactgtgggtgggacagaggccaggacggactgagctaagagaccgagagaactccggctagggcgaggggcggggctggtggaggcggggctggtgggggcggagtcggccggaagggccgaaaggggcgtggcaagaccttggcgaggcggccggtaggcagggggcggggcgtgggaactactcgggagcagagggggcgtggctagaccttagggggcgtggtttaacgccgggagcgaaggagacagaattctttggcaggggcgaccttagaatcctggggaggagcgagaatggaatcccggggaggaacaggggtggaatccggggggcggggtcagaacgccaggagggggcggggccggagccagggtcggcttgactcgggggagcagcgggtggatcctgtgacgtcagcgggttcgaaccgccggagctgagcgagaggccgggggtgccgagccgggcggggagagctgggccgggagagcagaacagggaggctagagcgcagcgggaaccggcccggagccggagccggagccccacaggcacctactaaaccgcccagccgatcggcccccacagagtggcccgcgggcctccggccgggcccagtcccctcccgggccctccatggcccgggccgctgccctcctgccgtcgagatcgccgccgacgccgctgctgtggccgctgctgctgctgctgctcctggaaaccggtgagacgagcggacggccccctgccctcgcgcggaccccctccaaccttaccttccgagctggggaagccgagcaccttccccgcccacccccggctccccgagccccctctcgcgtgcccccttcctggctggccccacagactccgaccccctacacgtccgattctctcgaggagactctgacccctcctttctgcatctctctcaccaccacccccatccttcttaatccaattgcccatcctacgcctgcttgtctgtccccctccccatttctcggattcccgcgccgaaagggttaaatcccaggaaggcctggtgccccctccccaccccgcgccgagtagttcacccggatctgggtctctgtctcctctacccctctcaggaatgtggggaatgttccccccacctaccgcagtaaggtctcgaggaagaggcgagaccacctccctcccctatttttccttcttcccggcttgggcgtctgaggcccggagagaactgaggacaagcggacctgattcgggtcccttggagggctaaggataagagttctggcgacttagggggaagggcctgagctcggagctccaaccccgaacctcagggagttgggggttctgactccgtggactccagaaaaattaggggccgggggctccgtcttcagggtccctggtagaatggaggctaggcgctaagtctaactgggatctaggtaaaactgggggcgagagaggatcaaacttgtagcttctggatttaattgtgggcagggggcttcgttttcagggttcccggcagaaccgggggacaggagactcgatctcgtgggcttcagacttaattgtaggcagaggaacgtcttctgagatccaaacagaagtgcgagcagcgggccccgtctcttgggctccagatatgatcaagggtcgaaggctctgtcttgaggctggagtctcagtcgcctgagtcccagatagaacgggaggccccgagtcccagaggctgggagactcctccctttccctatgaatggtcgggggcgacggagacgtcgccggggaagttttcctggtttcactctcgccgagccagggaggggcggggcgggcgctcctggctccgggttccggactccccggtttcgggaccttatctatcctctggtagcgcctttgtcctcagagccatagcaggaggtggacgagtggagccgccgcccttatcccccgtccctcccattgctatgccttggaccccctggcgtccttccatccaccccactaggggaggagagcggcccccctggggagggaggggctgggagggaacccttgaaagaggcgctggccccgccccttgcaggtgacccggttgtgtattcccagcgacaaactctgggatgctagagtttcccgagggtttgcgcagaagagagctcagggggatcttgggggaaccccggccacctctctggcctcatttcccccaggatggctctcactggcctcccagctttgacccagagctgggaactccgcttccatcccctgcctctcccttcaggcagaaataggcagatgagatcagaactggcacctctgggtgaattctccgaacccaccagaccctgagcctactgttagcttggtgcatgatctcaccgaaggctccagcttgccctgggaaacaggtcctgtttctgtttccatcttagagatgaggaaacaggctcagcaaaggcaagcagccttctcaaggtctcacagcaggtcccggggaagccgggctccggttcttcagagccccgcaccgggtgggctccaggaagtgcctctgagtttccatttcctccctcgtaaaaaaactgagataacaatcctttccctgcggaccatccggaaggctcccaggccccactgattccctgtgaaacctcttagcccctggagaaggagctgtcggcccctttcttgaccacccccaccccaatccttcgcctctgctgtccactggctggccggctggcatgtgctcgctctccctctctctctctctcccctccccctccctgttttcctccttccctcactttctttccccctcttcatctctcttcgtttctcaccctttctctctccatccctctccaagctctttctctcttctcctctccccatctctctctctcctctccgtctttctctgtatacctgtctagctccactgcctcccccgcttggcctcctcggggaatgcgggtgcaccacctgggcccccagctgggccggctcccctcccccagctttcttccctgcccatccgtgtgtccatgtccgccaggcagccccacgtagtggagggggaggggagcagagggacggcagcctggctgtctcctctcattagggaagggggactgggcagaggagaagttggggggtgggtatatagagaggctggagctacaaggatgggtacagaggccaatagagggaagcggtcagacacagatttaggaatggggtcagagacacgtgtaggaatggaatcagaggatagaaggggagtgaaatgccggcacagggtcgggggagtgaaataccgacacagggatgaggctgaaagacactggaatgggacggaggagggtgggggaagggagctagacatagataccagatgaaggcagggacaggaaaaggaaaggggtttggtgacaggcagggagccccaaagactccagctgtgggacagcagaggtgccgtgacccacggaggtcagggtacagggggcctcaaggccagcgacatgtgggggccacagggagtgatgaacacagaagggacagggagctgggcacatgggccagctcccccgcccctgcctgggacgctgttacatttttaatgtcccagcagtgctgacaaatggagcaggaaggggaggagaagaggggacccagcaagatgggccaggctgtgagaaggtgtgtcagaaatatggggagacagggcactggagacccaggaggcagggagactccacagtcagagacagaaacagagacgtagaccagaaggcttgtgagaagagaaccccaggaatcaaggcagagagccaggttccagacacagggagacccagacggagaaagagaccggagatgtcagacatacagaggaaagaggaagagagtgactaacggggacagggtatcttctcaggctaatgaaaatgttctataattgctcgggtgatggatggctaactctgaatatacaaaagccactgaactgtacactttaaatgggtagattgtatggtatgggaataatgtctcaataaagctgttacaaagagacagagaatataagaggcacagagcagagaccagagactctgggggacacagataagagtgacagaggccaggcacattggctcataccagtaattccagcactttgggaggctgacgcaggagaatcgtttgaaccgagttcaaggctgcagtgagccctgattgcactactgcactccagcctgggccacagagcaagaccctgtctcaaaagagaaaagagtaacagagaccccaagagagaccctgggaattggagacacagagggacagggaccctaagaactagacacagagagagatagaagaggccccggaagacacagataagagacgctaagagacagcagggataccattaaaagactttcaagaagccaggcatggtgactcatgcctataatcctagcattctgggaggtccaggcaggtgtatcacttgagctcaggagttcgagaccagcctgggcaacacggcgaaaccctgtctctgcaaaaaatttaaaaattagccaaaggtggtggtgtgtgcctatagtcccagctacttggaaggctgaagtgggaggatcacatgagccaggaaggttgaggctgcagtgagctgagatcacaccacagtactccaccctgggcaacaaagcaagatcctatctcaaaaaaacaaaacaaaacacacggattagaggaggccagggggcaggtgcagaaatccaggcacagacagacagccctacatcctggctgctgcagccgctgctcactccctgaaccagctcctggatttccgctgtgggggttgggcactgtgattaatacaattaattaactgacaaggtgactgaggcagcagctgaggccagtactcaaagcctctggccttcaagggccttctctagtcccgacgtgccttgccatgggaggctgggtcgctgtgctttatagatctgcgggggaagccaggccctggggagccagccaggcaggagtccaggagcccagctcctcctcccctagacccaggtgtccagcttcaggccccgcctccctcagacccagaagcccaggccccagcctctcctccctcagacccaggagtccaggccccagccctcttccctcagacccaggagtccaggcccccatccctaatccctcagacctgggagttcaggcccccatccctgctctctcagacccaggagtccaggccaccagtgcttcctccctcagacccaggagtccaggcccccatccttcccctctcagacccaggagtccaggcccttagtccctcctccctcagacccaggggtccagcctcagtcccctgctccctcagacccaggagcccaggccccctgctcttcctccctcaaacctgggagtctaggcctccagctcctcctccctcagacccaggaatccaggcccccagccccctcctttctcagacccaggagtccaagcccccaacctctcctccagggttccataggtcactctgcaccctcctcgctgccttggtctacccatccctggatctcggggtctcaagctgtgtctgtccccattgttctcccatgggctcacactacaccctgggcagcctccactctgccaccacaggaagcctgcaggtgcagtccacagggagaggaagtgtgtctggggacccagctcacacttcatgaagctgtcaccagtctggcttgcccagtgacactgagggaggctggtgttcccatggccacagtcccctggctatggtgctggccatgtcctggccaagttcatggcacagcccctgcctagcagtgtgctggatgatgggggctcactccaggctgaccaacctcctggctgtatctcccttgcctccacctgacatgcagagcgtctgggcagcggccctcacccctgtcccctttacctccgcagccctgtcagcctccaagtcccaaccctcccagcttctccctgtcacccccaccgctggtcctgctttcccattccaagttctgagtgtgtttccaatctcgccatcctccgtccccacagccccgaccctgatcccggcgcctccccccgagacccctgccccactgagggctctttcttttttcttttttttctttttttgagacaagagtctcactctgttgcccaagctggcaatagtgtctcactctctcactctgtcttccaagctggtacagtggtgtgatcttggctcactgcaacctccgcctcccaggttcaagcaattcttgtgcctcagcctcccaagtagtggggattacaggcaggtgccaccatgcccagctaatttttgtatttttagtagagacgggctctcaccgtgttgcccaggctggtctcctgagctcaggtgagccactgcacccagcctgtgagggttttttctttctctttttgttttttttgttttttttttgagacatggtagccaccacctgtaatcccagctactcaggaggctgaggcaggagcccgagacagagcaagactccgtctcaaaaaaaaaaaaaaacagaaaagacttgggcttgtttcctgagggctctgtgcagaggagggcgtgttctgcactttctagcaggatccttctagctgtgcataggaacaaaccacaaggacaactgcagtcctccaggtgggaagtggcagtggattagaccagggcagggactggggaggcgtcagaggtggtctaactagataaatgtcaaagaaggaggtgacagggtttcctgatagattgcttatgaggtgagagagaaagaggtgaaaatgccttaaaaatggactgtaggcaggacgcggtggctcacgcctgtaatccaagcactttgggaggccaaggcaagaggatcgctttagttcaggagtttgagaacagcctaggcaacaaacagtgagaccccttctctacaaaaaaaaattttttttaattagtcaagtatggtggtgcccgcctgtagtcccaactactgagaaggctgaggtggtaggattgcttgaacccaagaggttgaggctgcggcaagctgggatcctgcactccaccctgagcaacggagtgagatcctatcccagaaaaaaaaaaaaggaatgttaaccccacagggcctgaactatcctattcattcatttggaattagaaattcagaatggggaacttacagcaatgggattttttttttcagacggagtctccctctgtccccccagctggagtgcagtggcgcgatctcagctcactgcaagctctgcctcccagattcacgccattctcctgcctcagcctcccgagtagctgggactacaggggcctgccaccacgcccagctaatttttatatttttaatagagacgtggtttcaccgtgttagccaggatggtctcaatctcctgacctcgtgatctgcctgccttggcctcccaaagtgctgggtttacaggcgtgagccaccacagctggccctttttttttttgagatggagtctcactctgtcccccaggctggagtgcagtgctgcaatctcagctcactacaacctccgcctgctaggttcaagtgattctcctgcctc[134 bp omitted]gcctcccaaagtgttggaattacaggcgtgagccattgcgcccagggattttagaacctcattcattcgttattcagcaagtactgagcatctactaggtaccaatctctcttgcagatactgagggtacaggttgtgagcaaaacagacagaagatccctgccctcgtggcgctggcagtcagtttccaggaggatgtgatatatctagtgtgtgagatggtgagaagcactatgcagacagagaacgtaacagggcaaaagggcggaagagcagtcaaccagggaggggagaggaggtggcagctgaggtggagtatctcggggtaaaagaaccccccgaggagtgtgccccacaagaagctaaaagtggtgggtttgtttgagaccgagtcctcactctgtcacccaggctggagtgcagtggcgcaatctcagctcactgcaacctccacctcctgagttcaagcgactctccctaaagtagctggaattacaggcatgcagctaatttttgtatatttagtagagacagggtttcactgtgtcggccaggctggtctcgaactcctggcctcaagtgatccatccaccttggtctcccaaagttctgggattacaggcttgagccaccgccccatcctaaagtcggtttttttgttttaatcctccaaatccagtagtgctcagatgccatcctaaatggaggattggaggggagcctcccttagaaggaagatctgggcccctggaagccacaggactgctccttaagtcaagaactctgaatctggccaggtgcagtggcttatgcctataatcccaacactttgggaggccgaggcgggtggatcacttgaggtcaggagtccgagactagcctggctgacatggcgaaaccccatctctactaaaattacaaaaattagctgggtatggtggtacatgcctgtaatcccagctacttgggaggctgagacaggagaatcacttgagctggggaggcggaggctgtagtgagcccagattgcgccactgcactccagcccgggcaacagagtga[183 bp omitted]gcgggcacctgtagtcccagctactcgggaggctgaggcaggagaatggggtgaacccgggaggcggaggttgcagtgagccgagatcgcgctgctgcactccagcctgggtgacagagcaagactccgtctcaaaaaaaaaaaaaagaactctgagtcagcctggc[174 bp omitted]gaggcaggagaatggcatgaacctgggaggcggaggttgcagtgagccgagatagtggcactgcactccagcctgggcgaaagagtgagaatctgtctcaaaaaaaaaagaaaaaaactctgaatcccagagacccagggacttggaggaggtgaagggtgtggggctccagggacctggggctcagcttttcaggtctcctcctccaggaagctcttctttcgttcatcgtccctccctccttcagacaggtcaagcctcttcaggttcctcccataccacccctactccgtcttccaggcattcttggtgataattatttgtgcaatatttgtaccccctgcaatctggatgtcaaccctggaaaacaagcacctgatttgtcctgttacttctgcagcatccacacttagcaacattcattcacttggcagtgtttactgagcacctactacatgctaggccctgttgtaggtgctggggatacagtaggggaaaaacacagacaaacctcagggctggagagggcagaccctctagcacccaggacctgtttgttgagtaactatttgttttttggatttgacctataagatgtgaaagaacagccagattcttccaggttctgccttttcctgatccctccctctctccctactaccaaatcccttccattttaaaattttaaatcctggtggggcacagtggctcacgcctataatcccagcagtttgggaggctaaggtaggcagatcacctgaggtcgggagttcgaggccagcctggccaagatggtgaaaccctgtctctactcaaaatacaaaaattagctgagtgtggtgacatatgcctgtaatcccagctactcgggaggttgaggcagaattgcttgaacccagaggcagaggttgcagggagccaagatggcgccactacactctggcctgggtgatacagcgagaatgtgtttcaaaaaaataaaatcctaagacctattagcctcctccccaacactcagtctcagtcttaacctcttgttcttttcattgccaactttttgtgtcattttgctgtctggtcatctatctctgctcagcccaccaccttcccctcaggcctccttggatgaagttaagtcattctctatttgaagaacccgcaacggctcccacttgccacaaagaggaaactaacttcctcggccccagcctactttgctgtctctgcagttcacacaggcccaaatggctttccttgaccctcattgagtggccttccccccttgcctagctaggaaggggccagagcgcttaaccaccctgatcccaaccttagtgcctttgggggccaggcgggtgataagtcccagcacctggggaatctggaggagccggaagggagtgtgccttgtgggaggggggtgatgtccttcctcagccccacccagctgttgcccccaggagccacatatccggacttctgtctggagctttagacagcaatctccaggccttctgtgtgggctgctacttcccaactgaaataacactctgtgggccaaagcaaacatgcaccacagtcagatctggcctgcagcaggcggctgacccctgctgctctgctcacctgggccacgccccgtgaacatcccccatgagcaagtccttccctggaactggcacaagggaccctggagggtggctgaaacatccccattttacagatggaggaagttgggcttggagacaaggctgccagctggaaagggtgtcagcgttaaataacaagattcagaaaataggattaagtatagagtttattcaagcctaaagcttgaggatggccaccccggagtgtggattcaagttgccccaaataaaccctttgactagctgtgattacaagtggactttttttttttttttttgagacagggtctcaccctgtcactcagtctggagtgcagtgtgtgatcatggctcactgcagcgtcagtttctcgggctcctggccttgagtgattctcctgccacagcctccctagtagctgggactacaggccctagccatcttgcccagctattttttttttttgagacggagtcttgctctattgcccaggctggagtgtagtggcacaatctctgctcactgcaacctccacctcccgggttcaagcaatcctcctgcctcagcccccctagcagctaggattacaggcacctgccaccatgcccgggtaatgtttatttttttagtagagatgggatttcgccat[136 bp omitted]actatattgtccaggctggtctcaaactcctggcctcaagtgatcctccacccacttcggcctcccatagtgctgggattacaggcatgagccaacgcacccagtctgcaagtggatttttaaggaacaaagaagagagagttcctaaattgttaccaagaatttacattgaaacagcataaggtatctgcaggtctggctcagaaaaaaagataacagaaggtattgattggctatgcactgtttattgtatcacaaattccaggaacaagaagctaatggggagggcagctgtgcaggaaccactgcctcgggcatgggtggaggaggcgtgtgaccgaagtcccctattcactgtacagtctccctgggcctgatacatttcgcatagctcagactgatctgagctatttttcttttctcaagttgggtgggggtggcccctctggactggaaaagcctcatttttcccccaagtgacacacctgagtttgtttgacttgtttcccccaagtgacacacctgagtttgtgggacttgtgtggagatgatgtatttatgtcacacttcagtcttcgctgatggcttttttttttatatttatttacattttttcttttaaggtaggcagggcctcattctatcgcccatgttggagtgcagtggcgaggtctctgggttcaagtgattccccttcctcagcctcccaagtagctgggaatacaggggcccgccaccacgcccagctaatttttgtatttttggtagagacggggttt[135 bp omitted]ccctcccgagaccgagtctctctctgtcacccaggctggagtgcagtggtatgatctcagcttactgcaacctccacctcccgggttcaagcaattctcccaccttagcctcctgagtagctgggattacaggtgcctgccaccacacccagataatttttctatttttagtagagatggggtttt[132 bp omitted]ttgctataatttactgatgatttcttacccaaagatcctcggcctgtccccacccaaggggactgccttccaccggggacccctcataagagttactcattaggatggtgttccctggggttcctgtgtgtatgacgccagggcctgtgcaccgcctccatggcccatctccatcagacagagctgggcagtggtgttggccctcgaaatgaggcttgtgccctggcctttcctggcctgggggctgagtgccaaggccacctgtaattaaactgagcttcctatgtttacttagcaagcactgacctctcatttcctggggccctatgctgagtgttccacagctattctttaatctttaaacagcccttgggacgcaggcactattattaacctcacatcacagctggggaaactgaggcacagagaggttaagtggcctgcacaaggtcgcagagccaggattcaaacccatgaactatgggccactcagtcgccatgctgtactgccgtgcacagcagaggaagatt[137 bp omitted]atggtgaactctggtctctactaaaaattcaaaaatcagccggaccgtagtggctcgcacctgtaatcccagctactcaggaggctgaggcaggagaatcgcttgaacccaggaggcagaggttgcagtgagttgagaccgtgccactgcactccaacctgggtgacagagcaagactccgtctccaaaaaaaaaaaaaaaaggtgagaaaccacttaggctggctgagaactgcaaacatgcgtccacataaaaacttgaacttgcatgatcccagcagctttatttatcagagccaaaaagttgaaacaacctcaatgcctatcagcggctgaatggataaacaaaatgtggtccgtccatgtagtggaatattattgagccttaaagaagagtgaagcgccgacacgtgttacagatggatgaacctggaaaacaagatgccaagtgaaagaagccagacacaaaggctacatagtctattacatgaaatgtccagaacaggcacatcaacagagacagaaagttgcatcgtggctgggggaatgggaagtgactgcttaatggataagggggttacttagggaattataaaaatgcccaggctgggcgcagtggctcatgcccgtaatccgaacactttgggaggccgaggcaggtggatcgcttgagctcaggagcctaagcaacatgatgaatccccatctctacaaaaaatacaaaattagctgggtttggtggctcgcacctgtagtctcagctacttggggggctgaggtgggaggatcacttcggccccagagacggtttgcagtgagcagaaatcgcgccattgcacgccagcatggacagagtgagatcctgtctcaaaaaataataccttaaaactgattatagtaacagatgtaaaactccaaatatacttaaagccactgaattgtactgtattttttattttacttttttataaaaaaattatatatatatattgttttttcttttcttttcttttttcaagacagagtctcactttatcacccaagctggagtgcagaggcgcgatctcggctcactgcaacctccgcctcctgggttcaagtgaacacgtccggctaatttttatatttttagtagagacagggtatttcaccgtgttggccaggctggtctcaaactcctgacctcaagtggcccacccacctcggtctcccaaagtgctggaattacaggtgtgagccactgcacccagccttaattgtatactttaaatgggtgaattgtgtagcgtaagaatttatatctcgataaagctgtttaaaaaaaaaaaaaactacgtaaaaaatgagcaaaggacccgaagagacatttttctaaagaagacatacaggcagccaacaaacatgaaaaaatgctcaacatcattaatcatcagagaaatgcaaatttaaaccacaatgaggtgccatctcacctcagtcagaatgtctgttactaaaaagtctaaaaaaacagatgctggcaaggatttggagtaaagggaccgcttacccactgttgatgggaatgtaaattagtacagcctctatggcaaacagcatggagatttctcaaagaactaaaaatagaactaccatttggtccagtattccactgagtatcctcccaaaggaaaagacatcattatatcaaaaagacacctgcgcttgtatgtttattgcagcactatccacaacagcaaagatatggaatcaacttaagtgtccatcgatgaatggaggattggataaagaaaatgtggtctatatctacaaagatttcatgacgaaattgccaaaagcagtgcagcaaaagcaaacattgacaaatgggatctaattaaactaaaaagcttctgcacagcaaaagaaactatcctcagagtgaacagacaacctacagagtgggagaacatttttgcaatctatccatctgacaaaggtctaacatccagaacctacaaggaatttaaacaaatttacaagaaaagaaaaacctaaaaaagtgggcaaaggacacgaacagacacttctcaaaataagacagtcatgcagccaacaaacatgaaaaaaatgctcaacatcactgatcgttgagaaatgcaaatcaaaacaatgagataccatctcacaccagtcaaaatggccattatcagaaagtcaagaaacaacagatgcaggcaaggttgtggagaaataggaatgcttttacactgttggtgggaatgtaaattagttgaactattatgaagacagtatggcgattcctcaaagatctagaaccagaaataccatttgacccagcaatcccattactggtatatacccaaaagaatataaatcattctattacaaagatacatgtatgcgtatgttcattgcaggactattcacaataccaaagacatggactcaatccaaatgcccatcatggatagactggataaagaaaatgtacaggccgggcactgtggctgacgcctgtaatcctagcactttgagaggc[135 bp omitted]gaggcaggagaatggtgtgaacccaggaggcagagcttgcagtgagccgagatggcaccactgcactcaggcctgggcaaaagagtgagactccgtctcaaaaaaaaaaaagaaaagaaaaaagaaacctgcacatgtatcctggaacaataaaaaaaaaaaagaaagaaaatgtggtatatgtctaccatggaatactacacagccataaaaaaggatgggatcatgtcttttgcaccaacacggatggaactggaggccattatcctgagtaaaatagaaagtcaaataccacatgttctcacttataagtggaatctaaacagcagatacacaaagattggaataatggacagtggagactacaaaaggtgggagggagggaaacaggtgagggttgaaaaattaactgttggaggctgggcacagtggcgcacacctataatcccagcactttgggaggccgacacgggtggatcacgaggtcaggcgttcgaggccagcctggcc[225 bp omitted]actcgggaggctgaggcaggagaattgcttgaaattgggaggtggaggttgcagtgagccgagatcacaccactgcactccggcctgggcaacagtgcgagagtctgtctcaaaaaaaagaaaaattgactgttggaagccaggtgcattggtgcatgcctataatcccagcactttgggaggctgaggcgggctgctcactttgagttcaggagtttgagaccagcctgggcaacatggcaaaaccctatctctacaaaaacaaaaattagccgggcactggtggcacatgcctgcagtcccagccactcaagttgcagtgagccaagattgtgccactgcacttcagcctgggagacagagtgagaccctgtctcaaaaaagaaaaagaaaaattaactgttgggtacgctgtttgctattcaggtgatagatatgctaaaagcccagacttcacctctatgcaatatatgtatgtaagaaactggcacttgcacctgctaaaaatataataattttaaaatttttattttaataaaaaaatagaaacttagggccaaggggggagctgatcatttgaggtcaggagttcgagaccagcctggccaacgtggtgaaagcccatctctactaaaaatacaaaaattagccaggcatggtggcgggcgcctgtaatcccagctactcaggaggctgaggcacaagaatcccttgaaccagggatggaggttgcagtgaccaagattgctccactgcaccccagcctgggcaacagagcgagactcagtctcaaaaaaaaaaaagaaacttgagaaaaaatgctatgtaggaggtctgtaggtttcataggaaggtgagagaaagtatattactgaggggggatgaagacaatactcagcctttaaatgttttaaaatgtattttatgaaagtttttttttattgatttattttcagaggattccccccccccaaaaaaaaatcttatgaaaattttggggtgggctgggtacagtggctcacgcctataatcccagcactttgagaggctgaggtgggaggatcacttgagtccaggagttcaagaccagcctgggcaacatagcgagacattgtctctaccaaaacaaacaaacaaaaaatacaaattagccaggtgtggtggtacatgcctgtagtcccagcttgaacctgggaggtcaaggctgcagtgagctgggtggcccactgcactctagcctgggtgaaagtgaggccctgtctgagaaaaaaaatgtagttgaaagaaaagaaaacttttatttttttattttcttttttaattttaaaggcagggtctcactctgttgcccaggctgttcttgaactcctaggctcaagcattcctcccaccttggcctcccaaagtgctgagattgaagtcttgagccactaccctggccatcat[139 bp omitted]cagtgaaaccccatctctactaaaaatacaaaaaagaaaaaaattagccaggcatggtggcaggcgcctgtagtcccaggtactcaggaggctgaggcaggagaatggcgtgaacccaggaggcggagcttgcagtgagccgagatcgcgccactgcactccagcctggtcaacagagcaagactccgtctcaaaaaaaaaaagaagaatggcctggagcctccctcaccttctccacctagacccacttgacaatgggtgacatattttggtttttgctgaaccatttaggagtaacttgagatcatgacattgcgacttcatatcttctgggaaaaatagtgtgtgcacagccacaatttaattatcacacctcggaacatgaacagcaattccaaaatcatatgtaatatgaactcatagtacacgttatagttgtataatagaatagtcattttagtcttccctaaaatgtcttttccaggtggcttttttggaatcaggatgctgcgaagctgcctacgttgcatgcggagcctgcatttcccgtggggcccccttcgtggtggccctgcctggaggtgtctgggtccctcccccacccgactacttcactctctgtcctctctgcccaggagcccaggatgtgcgagttcaagtgctacccgaggtgcgaggccagctcgggggcaccgtggagctgccgtgccacctgctgccacctgttcctggactgtacatctccctggtgacctggcagcgcccagatgcacctgcgaaccaccagaatgtggccgccttccaccctaagatgggtcccagcttccccagcccgaagcctggcagcgagcggctgtccttcgtctctgccaagcagagcactgggcaagacacagaggcagagctccaggacgccacgctggccctccacgggctcacggtggaggacgagggcaactacacttgcgagtttgccaccttccccaaggggtccgtccgagggatgacctggctcagagtcataggtgagcagggtaagggcgggaggcaaggaggtgggagggccgcggtgtgggagcatccccttgcgggtcagtttctctcttggcttcagctgtgaggttcacattctctgtgggtttccatccatcagcaaatgttcattaagcacctaccgcgtgccagatgcttttctgtgtgctgaggatgtggcaggcaaccaggcattcttgggaaaaacaaaaaaataagtattggctgggcgcagtggcccacccctgtaatcctagcactttggaaggccgagatgggcagatcgcctgaggtcaggagttcaagaccagcctggccaacatggtgaaaccctgtctctacgaaaaataaaaaattagctgggtgtggtggcccgtgcctataatcccagatactcaggaggctgagtcaggagaatcgcttgaacccaggaggcagaggttgcagtgagccgagattgtgccaccactgcactctagtctgggtgacagagcaagactcggtctaaaaaaaaaaaaagtattgaggttgggtgtggtggctcacgactataatccaagcactttgggaggctgaggcaggtagattgcttgagcccatggtggtgcgcagatgtggtcccagctacttgggaggctgaggtgggaggatcgcttgagaccaggaatttgaggctgcggtgagctgtgatcatgccactacactctagcctgggtgacagagtgaggccctatctctaataaataaataaaagagtaagtcaggcagttaaaggggccatggaagttggagagggccaagttgcaattctagctaaggaggtctggggatatttaggcagaaactaggagaggaggagccctctgggtatctaagggaagagcgttccaggcagacggaatggcaagtacaaaggccctgagacaggaatacctggagtatttgagggccaggaaggaagtcagggtggctggagacatatgagtgggggaaagtaggaagcaataaagtcaaggagaggatggggacagattggcaaaagccttgtggactataagaagcctttggcttttgcccagggaggataagagctgtagtaggttcttagcagcagacaggtttgatctggcttgggttctcaccagctcctcctggctgtgttgggaggggaaagaatgggagctgagaaaccacagggtaaggcaactacaaagtccgggtggggccgggtgctgtggctcacgcccataaccccagcactcagggaggccgaggtgggaggatcccttgagcctaggaatttgagaccatcctaggcaacatagtaagactcttgtctcaatgacaaaaaaaattttttttttttttgagacagagttttgctcttgttacccaggctgtagtggagtggcgcgatctcggctcactgcaacctccgcctcccaggttcaaccaattctcctgcctcagcctcccaagtagctgggattacaggctcccaccaccacacctagctaaatttttttgtatttttagtagagacggggttgcaccatgttggccaggctggtcttgaactcccgacctcaggtgatccgtccacctgggcctctcaaagtgctgggattataggcatgagccactgagcctggccaggaaagaaaaaaaaattgttttaattaaccaggctcagtgacttacctgtaatttcagctactcgagagactgaggtgggaggatcacctgagcccaggaggttgaggctgcagtgagctgtgattgtgctactgcactccatcctggacaagagagcgagaccctgtcttaaaacaagtccagtccgggcaggaagtaaaacggcttagaagtaggggacatagtggcctcattgagataggatgtgcagggaaggcgtcttagtcaagtcctggagtctgagaaggagctacctttgggcatagcagaggggcacgggcacagaaacctgggaggtgggcatgagatgggagctgggcgcgttccaggaatggaaagggggctggtgaggataggcaagggcttgggtgaccctcagcggggccacattacacgggcttcacaggtggaggcgaggaggctggactatgccctcagcatggttaagagccatgggaggtgtcaagccacaggagagatctggacaaacgtttgaggttgcaaaaaatgaccggcagcagtatgaggagtgattggaggagtggacggaggtagaagggagctgggacgagaggggagaagaggcattgctgggaagacggatgaggcagtggggggcagagggaagcgggcggcatatagtggtgtttttagaagatagtaggtgctggg[135 bp omitted]ctgggcaacatggtgaggccccatctctacaagaaaaaaaaaaattagctgggcatggtagcacacacctgtagtcccagctacccaagaggctgaggtgggaggatcgcttgggcctgggaagcagagattgcaagtgagccaagattgcaccactgcactccagcacgagaccctgtctcaaaaaaaaaaaaaaaaaaataggactcccagcgggaaggtgactgatacttggcaaaaatagagaaggcagggaagattttttttgaaggatgcttttttttcttttcctttttctttttttttttttttctttttttgagacaaagtctcactacattgtccaggctagactcgaactcctgggctcaggggatcctcctacctccgcctcctgcatagctgggattacaggcatgagtcaccacatcca[135 bp omitted]cccatctctactaaaaatacaagaaattagccaggcgtggtggcgggtgccttagtcccagctactcgggagattgaggcaggagaatggcttgaacccgggaggcggagcttgcagtgagccgagatcgcgccactatactccagcctgggcgacagagtgagactctgtctggaaaaaaaaaaaaatatgttggaagtcccctgggagcccaccttccctaggcaacttcccagaagccacgtcactctggatgccttttcttcccccttctcagcccagagcgtctgagaaggtcaccctgtgctatccttgagtaaacacttccctttccagtaacacatgaaaccacagccgttttccataatacaaaggacagctcttctcctccccaccctcacaaacgcctctcttcttgtgcaatcatttgttctcatccagagataacttcagggctgggcacggtggctcacacctgtaatcccagcactttgggaggctgagaggcaacaagagcaaaactctgtctcaaaa[142 bp omitted]aaccctgtctctactaaaaatacaaaaaaattagccgggcgtggtggcgggtgcctgtagtcccagctacttgggaggctgaggcagg[135 bp omitted]tttaatcaagcccaaagcttgaggatgaccacctgggagcatagattgaagttgccctgaatatacacttcaagcaggggccaaggcaagcagctcttgcaagtgagcttttgtttgtttgtttgtttcttggagagagggtctccaaaactacaaataaaaattagctaggaatggtggcgcacacctgtaatcccagctactcaggaggctaaggcaggcgaattgctgaaaccagcaagggcaggttgcagtaagctgagattgcaccactgcactgcatcctgggtgacagcaagactctgtctcaaattaataaaaaaaaaagagagagagagagataacctcaagagcttccgtatacacactggtgcagaagtaaggaacaaaacagccaaagcctctgtcttcatgatgcgtgagccaccaaggaatagttggccagagtcggcggtcaggaaagtgcccttgacgaagtggggcttggagtggggtctggagaaggaggccaaagcaatccaggcacaaaatcaccaaccaaaaccccaaagtgggtggaggcagagactgaggagggcgtggatggggagcatgtggagtggccaggggaggtggccatggggaagtggtgggctcgggccctgagtcactattctaacagcttggagggcggccaggaggatgtggggaggcttgttggatgctccacgatggtcaggggagaaggcggtgggaagggagagctgggaagaagaggagagtcagaccgtgttgagaagttcagaggtggatacccaggtccagaaagcaacagaagatgtgagtctgggtgggggacacacatcataagcatgagctgctattcttcctggagttttgtttttgtgatttttttccatgttttccaagagaatgaggtggaaagggtataaaaaaaagaaacggctttgagattttctgcctttatcacacttccagtcattcaatcatctaatggtgattacaggaaaaggaacagggggcctttccagctggacctttgaaccacagtactcagttactcgctcggccttgatttgctttttttttttccttttttttttttttcttttggagacagagtctcactgtcacccaggctggagtgcagtggcacgatctcggctcactacaacctctgcctcccaggttcaagcaattctcttacctcagcctcccgagtacctgggattacaggcacctgccaccacgcccagctaatttttgcatttttagtagagatggggtttcaccacgttggccacgctagtctagaactcctgacctcaggtgatctgcccacctgggcctcccaaagtgctgggattacaggcatgagccactgcgcccatcctaatttttgtattttcagtagagatgagttttcaccatgttggccagactggtctcaaattcctggcctcaagtgatccaccctcctcagcctcctaaagtgctggtattgcaggtgtgaaccaccacgcccgaccagcttttttttaaatctcagcctcctctaggcttttggaccctgtctctgcatctctggcagggcgaagagacagtataccgaaatggccaggccaggcgcctgtaacctcagagctttggggagccgaggtgggaagatggcttgtgctcaggagtttgagatcagcctgggcaacatagcaagaactcatctctacaaaaaaatttaaaaattagccgggcatggtggtgcatgcctatggtcctagctactctggaggccaaggcgggaggatcacttgagcctaggaggtgcaggctgcagcaagctatgatcacaccactgcactcgagaccaggtgacagagcgggcccctgtctctaaaaaataaataaagtaaaataaaatgggcaacacttggatagggcagtgcaggccagacattaccctaagccatttacctatcaatgtattatttaattcacacagcaatcctaggggtgggtactttcattatccccattttacaaaacaagaaacagctacagagttgcaaaaccacttatcccaagccaggccgctgataagcagcagagctgggattggaaccccggcagttagggcctaaccaccctgctcctctgctgagtgtttgttgaatgactgccggtgaggagtgacgcaccccctctcctcctctccccagccaagcccaagaaccaagctgaggcccagaaggtcacgttcagccaggaccctacgacagtggccctctgcatctccaaagagggccgcccacctgcccggatctcctggctctcatccctggactgggaagccaaagagactcaggtgtcagggaccctggccggaactgtcactgtcaccagccgcttcaccttggtgccctcgggccgagcagatggtgtcacggtcacctgcaaagtggagcatgagagcttcgaggaaccagccctgatacctgtgaccctctctgtacgctgtgagtgtatcgggggtgacccctcccccatcaaaactgcctacactggcttctctaaagcactgtctacattgtctctgaatgttgtctacgtgggttccctgaagccaaattctgcactaccttcctgccattgtctacactggctcccatgggcaaatctacatacttccccctcattgtctacattggctttactgggttcctgcatgctgtgcctagtctgtggtaacctgggatgggcttgcaagagccagtttgatacatttctttccaattccacatccaatgaagtcttctcggtagcttgaaatcaaccttggggaatatttacaccaaggaaattggcaaaccctagaaatgggggcttcttttattccccagagagttggtttaccagcaaagagctgcccccaacagtgtcttttctggctcccatggaccccggttgacactgcccctggaccgttagatcaatcatgctgggccatgtccacatgtctacatgtctacactgcccaacctaacatcgtctccacaccttcccatacttctgccttgacttccctaggtgccatctatactgagtctcccagagtctctacaccgacccctgatccttgatattatttacattgtatttattatttattatttattattatatttttatatattatatattatataaaatatataaattatatattatatattaacatatattttgtcattatttattattgttatttaatataatataattacattatattatatattacattacaggctccaccccccgggccctgttgatcctgacccctcccactgggttttttgctagctcttccagaaactgcctatactcacacctcgtaatgttacccagagaggccaccctggcactcttcacacagaatccctcaaatactggcttaaccacctcttccaccactgtccaaaatgaccacatatcccaactcaatgttgtctacactagctccccaggcaatgcctccacttacacagattccctaagccaagtctacaccagctcccccaggcaacatgcatcacgtgcgcccataagtgcaacagctcccctgagcctcgtctgtgccactttcctcccgggacctacactggttgcccaaaccctgttttgacatcctccctccatgccaaaaacacacacacaggccgggtgcggtggctcacacctgcaatcccagcactttgggaggccaaggcgggcagatcacttgaggtcaggagttcgggactagcctgggcaacatggtgaaaccctgtctgtactaaaaataccaaaattagctggacgtggtggtacatgcctgtaatcccagccatttgggaggctgaggcggagggatggcttgagcccaggacgtggagtttgcagtaaaccaggatcaccccactgctctccatcctgggcaacagagcaagatcctgtctcaaaaacacacacacacacacacacacattatttgtagtggctcccttaggcactgccagcactgaacaataactcccacaaaattatccacagtggtttccctgaacagtgtctacactgacatcagcacacaacagcctggactgatttgccccagacagttttgactgctgtacctcctgccaacccgccccgtttctttagcattcctgtctatctgctaacttgtccacccgctctgggattctcctccttgctgatccagtccccccatttcccccagaccctcctgaagtgtccatctccggctatgatgacaactggtacctcggccgtactgatgccaccctgagctgtgacgtccgcagcaacccagagcccacgggctatgactggagcacgtgagtcacgtggtctcagaaccctgggtctgagggaggcggggctgggggcctggactcctggatctaagggaggaggggctgggggcctggactcctggatctgagggaggaggggctgggcctaaattcctaagtcctccaggatgaagggagcttgcattttggcaatttggggtctccgggagtacttaggtccctggagcttggctcctggtgggtgtatctttagggatgaggcctgtgctcccctctcgaccttggtatccctctcacctgaccccacacccctccaggacctcaggcaccttcccgacctccgcagtggcccagggctcccagctggtcatccacgcagtggacagtctgttcaataccaccttcgtctgcacagtcaccaatgccgtgggcatgggccgcgctgagcaggtcatctttgtccgaggtgagtgggtcttgggggccgtgtgtggagacctgggtccgctcccctggagttctgcccttcaggacttggggctgcactgggggaggctgcgccgccgacctgggagggatgcagacctgcctggctgaggggagatgagggttggccttcccctcgtggcctcagactggggtctggatttggggtgtcggggtaggtgaaggcagcagagttggggggttgaggactttgctcggggttcctagaaagtagaggcctgggtagggtcctcacgaatagacccgaggaagctgccctgggctccagctcctgagaaagacgcacacctagagtcaggcatgcaaacttcaaagagacagaaaccaagagctcccacccccagaaacacaatccggccccaaggcacggagccaaagaggaaaagcacaaagccagaccatcacccagtgatggaaactgggtcaaactcacaactgcagggccacacacctagagcgcggccgggactgttaacagagccatgcttcctgggacagagagacccctgggtcctggagatagggccagagacccctcctgtcagagccacagctggcaggatccacagccacagacactccctgtgctgagaaattctgttgcagagatgcatcagaatccagacactcacctggatggtaaccctgcacgctcaaacccattgtcaccaagacacacacccaggaggacagtggcaccagccaagatagactgaacgaagccagatgacacctggaaagggacattctttttttttttttttgagatggagtctcgctctgtcgcccaggctgaagtgtagtggcgcaatctcagctcaccgcaacctccgcctcccgggttcaagcaattatcctgcctcagcctcctgagtagctgggactatatgcgctcaccaccaaacccggctaagttttgtatttttagtagagacagggtttcaccatattggtcaggctggtctcgaactgctgacctcaggtgatccacccgcctcggcctcacgaagtgctgggattatatgcatgagccactgcgcctggccagaaaaagacattcttagaaacacgccagggcgacggtccatgcagcacacctgtgcaaacacgcaatgtgcaggccccccagaaacatgactgaaggtgtagggacaaactcccagacaggggctgtccctgtcatgcagacagactagccacggagggacagaagcagacccccttactgagtcataatcttagaatgcacacacacttgcagggacacccgagggaaaacagacacctcttcaggaatccagatacagccagggagataggacacccctacgggaaacactgtcacagacagcaaacccagagagacagctgtcccgctctgggctcgcctggcgcgtgaggatgcacataagtccccggaggaagacgtcacacagacacgctgggggcaaaactaatccaggacagcaacggctgcacacggaggaatgtcatccctcactcacagaccctcagacggaaaatcaaagacatcctgggaggagcttcttcccaggaaccctcccgaaactccccgaaactcctccgaaattatccagaaagtccgttagggagattctcattcaacaaatatgtgtttcctgtttgctaggcactcttgctgaggttgggaatacaatggtgaatgagccacagtccctgccctcagtagcacacccaggggagggtcagctccacccgcccagacagacaccgaactggaaatacacccctaacctctaccccagatacacctgacaagctgatcccctgcccacacacccagcaggtggctccaaggtcagagcctgcagaacacagacgcaatagagaaagactcagcgctgtggaaagacacccccacctacccacgacagtggccacagggccacccccagccaataacaccattacaaagacacgtgccttcagataatgcctgcagaaacgtgcatgctccaagcactctagaaatcccgtctcaagcagtgagtgccccgacagccacagccagaggagacacactcaaagctcctggggtcactctcagagggtctctgagccacgaacccacatccaggcacacacagagtcgtcacagagacacagtatggagtccacagcagcacgaacataggatacgaacgccgcaccacaggacagatctatctttagggagactcagagaactttttatttttaatagagacagggtctcgctatgttggccaggctggtcttgaactcctggcctcaaagcattcctccagctttggcctcccaaagtgctgggattacaggtatgagccagcacactaagcctgattcagagctttgaaccctagacatatgaacagactcagcttcgagttccaaaacaccaatgccacctccagaaacagagacaagcctcccaagataggctcaacctggtccagttagtgaccagcacaggagaaaaatctgtttcactcctcaacccagtgtatagttagagacatatataccaccctaccccctaccaaaaaagattttatcctcctttttttaatgctatttgtgagtcactaagctgatttgacagcccgctgggtcatgaccccctgtttgaaaacaacagaaacagatgtccttcctgggtctcagcccctcctgtgtgtcgaggtgtagaggtggggtcaggtgtgggtgaaccccccacccccgtctgtcccagttatgccttgcatgcagggatgggggaagtggatgtgggtaggttctggttacattgacttctgtccctggcttggggcccaggagccccatccctccctgctcacactgccctcctcagcacttcatggcttcctctctctctccgcctccccactacctcccatcccccatccccacctgctcagcccctgcagggagcactaaggaagtcccactgtcccggtctgtgagaaccccattttacacactggggataagtggcctagagatgaggcagccacggcacttggaataaatgctcccagccactcaagagggcagaattatcaggaatctgtggccctctgcagagagctttgggatcagacagcctcccactgaaacccagctgtcctcccccgagggggtgtggcccccaagctcatagctttgtgaggaccccacagcacattcagggagggctgcgaagtcagatggcaccagggtcctggccagtgaccgggcggccagatctattgcatccaaatagccagcttccactcggctacggcgatcgccagacatgggagtttggtgttgctagatctgatttgtccccctaagagaaacctggatttttaagtgaaatcgcctgatttttgaaaggttggctagcaatttaaattttgcaaaacactaacacctggggaccaccggttggcatccccctccttgtacaaagtggtgctcaggctgtagcgaagggcggaggggcttctgcttccccacccccctcctcctcctcctccattcttctgcccagagtcaccccctcattctggtcactcccgctccctccatccccgcctatcctgcatctcccccaccccctcactccccagagcgatcctcgtgatcttgtgtctccctttctctctctctcacccctccttctctctctcctcagaaacccccagggcctcgccccgagatgtgggcccgctggtgtggggggccgtgggggggacactgctggtgctgctgcttctggctggggggtccttggccttcatcctgctgagggtgaggaggaggaggaagagccctggaggagcaggaggaggagccagtggcgacgggggattctacgatccgaaagctcaggtgttgggaaatggggaccccgtcttctggacaccagtagtccctggtcccatggaaccagatggcaaggatgaggaggaggaggaggaggaagagaaggcagagaaaggcctcatgttgcctccacccccagcactcgaggatgacatggagtcccagctggacggctccctcatctcacggcgggcagtttatgtgtgacctggacacagacagagacagagccaggcccggccctcccgcccccgacctgaccacgccggcctagggttccagactggttggacttgttcgtctggacgacactggagtggaacactgcctcccactttcttgggacttggagggaggtggaacagcacactggacttctcccgtctctagggctgcatggggagcccggggagctgagtagtggggatccagagaggacccccgcccccagagacttggttttggctccagccttcccctggccccgtgacactcaggagttaataaatgccttggaggaaaacatcaggggtgtcttgtaatacatcagaccccctccttgcatgttggggaaagagagggtgggacagggactcctaggtcccagggctgggaagagctgatccacgcccccggggaacgagagcctggcaggggttagactggggaaggctgtggggctcggaccacttggatccttgaaagacgcattggatggccgagaaccgcaaggctcgtgcaactaggattcaggtcactggattggggactcagaggcctggacatttggactcctgggtcccaggacagaggctgcctttctggatggtgtggccagacccatcagaggcaggagttctctggactcctgggccctcgggtggaggtgggggtggggacagcaggggctcagccaggttccctgcgtcctgagagaatgaggccagagggctgtgatccagtggagcctcagacctcaactcccccaggttgctgggggtctcgggaggggagggctgctccccactcccattcttaggggccctgagggcatggggcaggcggggggtgctggggaagtcccacctctggccaccccgactgtggctcccctccttctccatccttgcccccagggatcaccccaggggacttttcagtggctccctgggagtggcggcagctccctccagctcctctcaactggaaaagcaaagacggggggaggggcggcccttggtccttgaactcccaggctcagtaagggacaggtttttacccgcgtcacctctgctctcccaagcctccatgcctcctctgtaacacggggcaggtgtttccatcggcctcacaaggctgtcgtgggacccagtaaggacatgcccgtgatgccctcatgcagcctcattgacctccacagaccccaccaagccctgtgccaggcagtgctggggctgcagctgtggcctgcacagacccagtgccgtcctccggtgtgcacggccataatgaccacaagaatagcagcagtatgtttaggatgaaggtgtgtgtgtggaccgaggggcagtctctctctctcactcccccaccctctgaagccctccagaggatgccaggctgtggaacgggagcagtggagatccaacagtccagcgtcctctggaagcttcctcctcatctggagagtgaggccgatgcatgcgtgacccccacgggcccttccatacttgttacttcctctggttgtttgttgtctgtactcacccacccaccccacccggacaaccggagggcaggggcggggaattgggtccgcctggcacacagtggatccttcagtgccatgctgagtcctccttacacacccagcaaacacctactgtgtgccgaacctcaggcacacagtctagtatggaaattggcaagtaaacgggtaaccactccaaaaactcttccattaggaaagacttgagaaatggaaacgggaggtgctagcaaggaaggagaggcccaggagcaaacaggcttctcgcttctcgaccccttttcctgtcttgccttttttttttttttttttttttttttttttgagacggtgtctagctctgttacccaggctggagtgcagtggtacgatctcggctcactgcaccctccacctcccaagttcaagcaattctcctgtctcagcctcttgagtaacgcacccagcctttttttttttaagaagtggggtggtctccctatattacccagattgggctcaaactcctgggctcaagcgatcgatcctcccacttcagcctccaaaagtgctgggatgacaggtgtgagtcactgtgcctggcccctggctaattttttttttttttttttaagacggagtttcactcttatccaggctggagtgcaatggcgcgatcttggctcacggcaacctccgcttcccaggttcaagcaattctcctgcctcagcctcctgagtagctgggattacaggcgcgcgctagcatgcccagctaacattttgtatttttagtagagacagggtttc[141 bp omitted]ggtcttgtgctcgttgccctggctggtcttgaacaatccgcccgcctcgccctcccaaagcgctgggattacaggcgtcagtcactgccccaagccctaacccccttcctgataagtggaaggagattctagtccccagaggtgattctggatcccagaattctgtccccgcattctctgtcttctagccgcccctggtcctgtctcctctcctctcatcttcccactctgccccgcctcattctgccccagctacacagtctacttgctgttctttaaaaacaatacaaggcaggccgagcacggcataatcccagaacgttgggaggccgaggcgggaggatcacttgagcccaggagttcaagaccagcctgggcaacatggcaaaaccccatctctacaaaaaaattcaaaaaaaaaaaaaaaaagctgggcctggcggcacatgcctgtagttccagccactccggagggtgaggtgggaggatcgcttgagcccaggagattggggctacagttggtggtgatcatgccactgcactctagcctgggtgacaaagcgagaccgtctcaaaaaaaaccatagagccccacaagcctcctgcagggccgctggctgtttgcgctgcctgcgatacccccagacactctcatgactcatccccggtgtctctttcaggcccttgctcagttgtcaccttacagtaaggtagaggccctcccactaccttcggggaccccactttgcacctcctatcacttccgcactgtatatttttgtatcccccgtgacttactcccatctggcatgtgagctattgtactggtttgcttactgttgttctccctgcccaaccagaatcaaagttccatgaaggtagacactttgtatgttttgttctccactcatctcccatgcggggcacacatcctcgctccttcctcatgctcagcagtttgagttgaatgaaagaatgtcccctgcccatgggagaggacatagacaggcaggcgatgatgtggggtgggatggtcgcttggaataaggagctgtggcttcctcctggagaccccctcacgctgtccctctccttgcagagacccccaacacagcaggcgcaggggccacaggcggcatcatcgggggcatcatcgccgccatcattgctactgctgtggctgccacgggcatccttatctgccggcagcagcggaaggagcagacgctgcagggggcagaggaggacgaagagtaagtgatgggccctgagacggggatgggagaggggtcgaagaactgaggagtatggggtaggggtgagggtgggagaaaattctccataatggctgtgtgaaacagacagacctaaaggaactggggtctaaatggagtagggaggtatgggtttctctctgctataaagtatggcattgaatttaaaaattagctgggggccaggcacagtggcttacacctgccatcccagcacttttggaggctgaggtggggagatcgatcgtttgagcccaggaatttgagcccagtctgggtaacataggaagactacccccatctacaaaaaaaaaaaaaaaaaaaaaaaaatggccacgcagggtggctctgaccgctccgctctgcaaagactcctcggagcccaggatcctactacattttttttttttttttgtgacggagtctcactctgtcaccgaggctggaatacagtgatgcaatctcggctcactgcaagctctgcctcccaggttaaagcaattctcctgcctcagcctccggagtagctgggaatacaggcgcccaccaccatgcccagctaattttttggatttttagtagagacagggtttcactgtgttagccaggatggtctctatctcctgaccttgggatcccccctcctcagactccaaaagtgctgggattacaggcgtgagccaccatggctggccagttgttaataaaagaagaaagggcggttcctaaattgttatggagaatttacattaaaataacgtaagctattgattggctatccattgctctttgtatcacaaattccagaaacctgaagataaagagtaacactggtcaggcagggtgggtcaggcagggtggctcctgcctctaatcccagcactttgttttgtttttgtttttgtttaagatggagtcttggtctgtcgccctggctggagtgccaaggcgccatctcggctcactgcaacctccgcctccctggttcaagcgattctccagcctcagcctctcgagtagctgggattacagatgcgcgccaccacgcccggctaatttttgtatttttagtaga[132 bp omitted]ggccaaggctcttgttgctagtggttcgagaccagactgaacatcaaagtgagacaccatctctaaaaaaataaaacaaacaaaattagccaggcaaagtggtgcacacctgtggtccagctcctcaggaggctggggtgggaggtcacttgagcccaggagctcaagtctgcaatgagctatgatcatgccactgcactctagcccaggtgacagagcaagaccctgtatcttaaaaaataaaagactgggcacggtgcctcacacctgtaatcccagcactttgggaagccaacccaagtagataacttgagctcaggagttcgagaccagcctgggcaacatggcgaaacctgtctacaaaaaaaatacaaaaattacccagacctggtagcccatgcctgtagtcccagctacttgggtgggctgaggtgggggtgggggcatgtggaggctgcagtgagctatgatcacaccactgtactccagtctggccaacagagtgagaccttgtaaaaaaaaaaaaagaaaagaaaaatagctcagagcagtctgaggtatgcgagctatgcaaaatttgtttttttgagacaggatctcactctgtccctcaggctagagttcagtggtataatctgagctcactgcaaccttcgcctcctgagctcaaccaatcttcctaccgcagcctcccaagtaaatgggaccacgtaccaccacacctagctagtttttgtatttttgtagagacagggttttgccatgttgcccaggctggtcttgaactcctgacctcaggtgatccacccacctcagcctcccaaagtgctcggattacaggcgtgagccaccatgcccagcctggaatctgtatttaccacaagctctctaagtttttctgatgcacaggaaggtctgttacaccactgtcttaatcatctagttagttcaaaccaataacttgctgctgatctcctctgtgtgcagctccatgctgtgacccactgtgtccgagacggcctggagctcacaatatggaggaggagacaaaactgtctccagatagtgatggtgtagcatgaccagtgatgggatagggcagttgagcaagctctgagaagccagagggggcatctgacccaggctggatggtcaggtagggcttcctggaagaggggacatctgagctgacagaatgcatcgtaagcacctgtcattactgtatgctttggtctgtgggtgtgtagaatgagggacaggaactttaacctaatttgagggacaggaaggcacttcatttattcattcattcttttcacaaatatttactgaactcctcatagtggattctggagacaccttgctgacgacccagatctttcttttttttcttttcttttcttttctttttttttctttttgaggtggagtttcgctcttttttcccaggctggagtgcaatggcgcgatctcggctcaccacaacctccacctcccgggttcaagcaattctcctgcctcagcctcctgagtagctgggattacaggcatgcgccaccacgcccggctaattttgtatttttagtagggacagggtttct[142 bp omitted]agatggcatctcactctattgcacaggctggagtggagtgatctcatctcactgcaacctctgcctcccgagttcaagcgattcttgtgcctcagcctcctgagtagctgggattacaggcgtgcaccatcatgcccagctaatttttgtattttttggggagatggcatttcaccatg[136 bp omitted]gcatggtaattataaataacatttcaagtacaaattcagtaagtgccctgagggggaagtacagctaggtatgtccgtgtaacaggaattcctgatccactggggaaacctgaaggcttccgggaaaaagaggaattcatggaatgaataaaaactcttactccaggcaagaaaagggggcaggggaaagggagacccaggtagagggaacagcatgtgccataaccccggagtcagagggatgcctgggtcttaatctccacttgtcctacctcctaccccacagcctggagggacctccctcctacaagccaccgaccccaaaagcgaagctggaggcacaggagatggtgagcactttccctggagcccaagctatccccacctccacacccaccccagggctgggaggggcctggcagggagaagctggctgggtggtgggggcagttcctgacctccccgcccctctcccactacagccctcccagctcttcactctgggggcctcggagcacagcccactcaagaccccctactttgatgctggcgcctcatgcactgagcaggtaggagctcatgggaagacaaaggtgggttgggggtctgggttgaagggccaggggtcaggcctggcaaaagaggtcaaagactaaaggtcataactcaaggtcaagggtgtgtccccggttggtgcttaatgcattgagatgtgttcaggattccatgggggaggtcaggggtgaaaaggcccaaggtcacaaggttagaatttaaagtcacttgggggctgggcacggtggctcacgcctataatcccagcactttgggaggccaaggcaggaggatcacttggggtcaggagttcgagaccagcctgtgcaacatggtgaaaccccgtctctactcaaaacacaaaaaattagttgggtgtggtggtgcgagcctgtaatcttagctacccggggcgctgaggaggaagaatcgcctgaacccaggaggccgaggttacagtgagctaagatcacaccactgcactccagcctgggcaacagagcaagattccgtctcaaaaaaataaataaaaccaaataaataaaatcacctgggccgggcatggtggctctggtctataatcccagtactttgggaggccaaggtagctggaccccttgagcctaggagctcgagaccagcgtgggcaacatgggctacccagcaacattttgcgtctacaaaaatactgaatttacctggatgtggtggcaaatgcctgtaggctgaggtgggcggattgcttaagcccaggtggttggggctgtgccactacactccagcctgggcatcagggtgagaccctatctcaaaaaaaaaaaaaaagaggaaaagtcattaggtcaatgaaaattgattatctggtcaggcatggtggctcacacctgtaatcccagcactttgggaggctgagacgggcagatcacctgacgtcaggagttccagaccaccctggctaacaaggtgaaaccccttctctactaaaaacaaaaataagccaggcatgggtgacatgctcctgtaatcccagctattcaggaggctgaagcaggagaatcgcttggacccaggaggcagaagttgcaatgagctgagaccacgccactgcactccagccta[134 bp omitted]catggtgaaaccctgtctctactaaaaattacaaaaattagctgggcgtggtggcgggcgcctgtaatcccagctacttgggaggctgaggcaggagaatcgcttggacccgggaggcagaggttgcagtgagcccagattgcaccattgcacaacagcctgggagacaagagcaaaactccgtctcaacaacaaaaaaaaacagaatgaaagaaaattgattatctacatttgctggatactgtgcctgaagctgggacaagacaaatcaagtcactcccctcagtggtctactggaggtcaggggtcagacactgaggttgcgctcaaggttcaaaggactgtttagagcccaaggttaagtatttgaggtcaagactgaggtgaaaggttcatggggaaagatttgcagagatcgagtgtcaaaagtgagtcccaggattaacagggtgagttgcacgagctgggctttgggttaaggaagggctgaatgaatgtcccagtgcaatatggcctcaggggacaaggagtgaggtggcatcttgttggcatggggagagagcggtcaggattttggggtcaagagcagattggtaatctgtgtcgtgcgtaggaagtgatcttgagttcctgtcctctctctacctccaggaaatgcctcgataccatgagctgcccaccttggaagaacggtcaggacccttgcaccctggagccacaagcctggggtcccccatcccggtgcctccagggccacctgctgtggaagacgtttccctggatctagaggatgaggagggggaggaggaggaagagtatctggacaagatcaaccccatctatgatgctctgtcctatagcagcccctctgattcctaccagggcaaaggctttgtcatgtcccgggccatgtatgtgtgagctgccatgcgcctggcgtctcacatctcacctgttgatcccttagctttcttgccaaggatctagtgccccctgacctctggccaggccactgtcagttaacacatatgcattccatttgtgatgtctaccttggtggctccactatgacccctaacccatgagcccagagaaattcaccgtgataatggaatcctggcaaccttatctcatgaggcaggaggtggggaaggtgcttctgcacaacctctgatcccaaggactcctctcccagactgtgaccttagaccatacctctcaccccccaatgcctcgactcccccaaaatcacaaagaagaccctagacctataatttgtcttcaggtagtaaattcccaataggtctgctggagtgggcgctgagggctccctgctgctcagacctgagccctccaggcagcagggtcccacttaccccctccccaccctgttccccaaaggtgggaaagaggggattccccagcccaaggcagggttttcccagcaccctcctgtaagcagaagtctcagggtccagacccttccctgagcccccacccccaccccaattcctgcctaccaagcaagcagccccagcctagggtcagacagggtgagcctcatacagactgtgccttgatggccccagccttgggagaagaatttactgttaacctggaagactactgaatcattttacccttgcccagtggaataggacctaaacatcccccttccggggaaagtgggtcatctgaattgggggtagcaattgatactgttttgtaaactacatttcctacaaaatatgaatttatactttgaccaggtcttgccttttctgtgggatgtgaaggggatggggtgagacatgaaggggaatgaggaaggagtctaagggcttgagagaatcagtgaactggggtcaagagagttaaagacaaaaacaaagggaccaaagatacaaaataagaattgagagagtaa[137 bp omitted]tgcctc[221 bp omitted]cagggcatgctgtttaatgaacattcataattgcaacagcagtatgatgaatgggacaaagataaaaatagcaattggccagatgcagtggctcattcctgtaattccagcacttcgggaaactgaggcgggaagctcgactgagtccaggagttaagagaccagcctgggaaacacagtgagaccccgcctctacgaaagttagccgggcgtggtggcacgcacctgtagttcagctactctggaggctgaggtaggaggatcgattgaggccagaagttcaaggctgcagtaagctatgatggcgccactgcactccagcctgagtgacagagtccaaccttgtctttaaaaaaataaaaattaaaaaagcagtaacgaaagtataagaggctcaagtttaatgaataaacggcaagtaaaagtagactaaaggcaaaatcatgaataatgttgtaataggagcccaaggcatgacggataataaacctgaatgaatgggccagaggcagagtgatgaataatggaaaaatagggaccgggggcaagggaggtaacggacaggagttcatggatccaaaacatgatggctaattagagaagggccggaagaacgacgaaagtgagcaggcaggctggagctaaaagtagtctgggcaatgaagctcaaatgaatggggcagaggcatgatgggtaatgggagaggaatgaatgggccaaagatagaagccgcagtgacgcgaggaacaagaggcatgatgggtaacgaaaggggtgggtctaaggcaactgtttcgctaagaggtgatgagggcattgtgggtaacgaggagcagcgcagggttcgcagaacagattagaattctcccgaggcactctgggaagggccagcacttccggttttaggtcggctactccgaaccagaggtggggtgggggcccggctgccgcggtgcctggtgggacgcgaggcctgaccttgctgcctagccgcctctgccgcgcaacccacctttacctgtccttcgaccctggaacgttagccaatgagagtaccaagctgatacgccaccaaggtcgaccccgtacacgctggagccaatcaaaatgctgcaagggtcaaagccgaccaattatcacagcaacctcgccgcggggcggaatcaaaagagggcctcctccaggagagaggcggggcgatgcctcagcgggcgtggcaaaatgctcagcacagaccaatggcgggttagcaccggaacccgcggcgacgcgagccaataggcgcaggcgctgcgagccaatgggaagggtgggaggggcgccgtggctaccctgcgagtgagaaccaatacaaaaggacatttcagggaaagtgggcgggactttatgcacaagtccaatgggaagaccgagtcttgacgctggtgggcgggcctcagggcacactaaaccaatgggctaggtggggcggggcgacggtggtggcggcggcggcagcgggttcggttgcgcgtggcgcacggggtgggagcggagcccaggccgggagcaggcgccgccgccagtgagaaccggggccggagccgggtgcggatttgctggggctgagtcgggggcgcgcgggccctgacctctgccctctgacctctcccctagcaggcgaccatggggaacgtgttggctgccagctcgccgcccgcagggccgccaccgccgcctgcgccggccctcgtggggctgccgccacctccgccctcgccgccgggcttcacgctgccgccgctgggaggcagcctgggcgccggcaccagtacgagtcgaagttcggaacggacccccggggctgcaaccgccagcgcctcaggggccgccgaggatggggcctgcggctgcctgcccaacccgggcacattcgaggagtgccaccggaagtgcaagggtgaggggcgaggggcccccgctgggctgcgatggcctggatctcgggggaagggggaggacactggggactctgggatttggcgcgcaccattggaattatttaacagcactaggaggtgatgttgggatcgaatggtggaacgttggacttggggcttagaatgatggaatcaaatgctggaaacgggatggaatgtcatagcagtagagaaaagcctttagggacctgaggagccccgggatcagccaagccagacttctcttgtgatcgggaaggcaactgaggcccaaggtcacggtgtcagcaaggtgtcagcgaggttccttgggtatgggacccaaagcctccggatcccagcctggagcaattagagtagtagtagtggtggagatttatggagttctgttctggtgttcattatacgttaactcattagatccttgggacaattctgtgtggtgagggtcccatctttcagatgatgagtttgacctaaagttgctcagcttggtggcagtgagatttgagcaagcaaaggccctggccctgtctaactaggctgtactgcctctttacaggtggaatcctttgtgagatgttctgctgtgggtctctggagagagctgggggtggtagggaaggaagagatgagagttggtgtggggttggagtggagtgtgacagcgtttctcttctccagagctgtttcccattcagatggagggtgtcaagctcacagtcaacaaagggttgagtaaccattttcaggtgagccttcctggtgtccttacccaccagagatcgtccccgccgtccccctccctgcatctgcacactcggcccaattactcctccctcaagagctgggctccctgatacttgaaaagactcggagatatagtgccagactgactactcagtttggggacctagaatccagaggtactgtctccccatagcagctaggctggagtgaaggaacaggtctgtgggcctaccggcagcacctcctttctctgagtctcttagtcaggccgtgcctcccagtcttcatcccctgcccagcccagagaccttgtccttgccctcttcagtgggcaagcctatctgtccagtatcgtcacagctctcgctttccttccaggtcaaccacacagtagccctcagcacaatcggggagtccaactaccacttcggggtcacatatgtggggacaaagcagctgagtcccacagaggtgagcttcctttttcatccattcattgtatccttctaataacaaatttgtagccaaatgtcaagctaagacggcctcatcaggaaaaggtcacagctaccgagagcctggagatggggattgcatctctccgaggtgcactgggacacaaataattccttcatccagcaaacatccgccaaacccctgctctctgcctggccccatgctgagcagtgctggggatgtggccacagccaccctgtcaccagacagcgatgacccagggtggaaagggctggactgtagatcatgcagaactttgaatgccagactaggctttggactttctctagggggttgtggagagtcatggcatggtttggtcaagggaaagacgtggtccacaggttcccgctgtagaaatctctggggcatctctggggtggccatgtgggggctagttattaggaagggcaaaactggaggcccagacagggttggggggactgaatgaggtctctgcttctgtcatttcccttcagcaaatgtgtttattctgcaaaccttcattgcacaacacattctgtgcccagccctgtgctggcacacatgactgaaacagcatgggactcacccgtggggcaggggacagactgttcccagagagtaacaagccaggatgggcaaggctgacatgggggaacccaaaggtcggggagcctaactcagcttaggtggtcagagagcacttcgtggaggaggggacccccatccgaggctttctgaccctaggcttctcaccccggcccatctcacatacttgcacagtgcaccacctctgaccccttccgttctctctgcctcacaggcgttccctgtactggtgggtgacatggacaacagtggcagtctcaacgctcaggtcattcaccagctgggccccggtctcaggtccaagatggccatccaggtgagtggggcacggaggctgctgctcccctcggccaccgtgagcagggagccgccctcacaccccctcctctccacagacccagcagtcgaagtttgtgaactggcaggtggacggggagtatcggggctctgacttcacagcagccgtcaccctggggaacccagacgtcctcgtgggttcaggtaagaggcggagggcttggagggtggtcacaaaactgcagttctggctttgccagcaaatccaccccatttgtgaacctccttttctgccactggagaagtggctcagcaggagtgattttgaaacatcaggcaacatactacagtgggtgagacggtcacccactgaccatgagtgggtgagtcagagcagtcttttttttttttttttttgagatggagtcttgctttatcacccaggttggagtgccgtggcacgatcttggctcactgcaacctccatctcctgggttcatgcaattctcctgcctcagcctcccgagtagctgggattacaggcatgcgctaccacgcctggctaatttttgtatttttagtagagacagggtttcaccacattggtcaggctggtcttgaactcctgacctcaagggatccacccacctcagcctcccaaagtgctgggattacaggtgtgagccaccacgcccagccagtcagcgcaattttaactgagattttcttttgtattaaaaaatgttttaagatggggtcttgctgtattggccaggctggtcttggaactcctggcttcaagcaatcctcccaccttgaccttccaaagtgctgggatgacaggcgtgagccacctcgcctggccagggaaacagcttttcagcctgcaagtagtgcagtcgggactcgtgaaaggaacttgagggaggatggtcccctggttgcataaggctttgcagagccttggccttcgctctgagtgagtctggggctttcggaaaccaaggcatagcttctcacaggaccctgcagctggcgtagagagcagactccaaagggggtaccactgggagggagtggacggggagaggaggttggattctggatgttgtttgaaggcagagctgccaggatttgttgagaccggatggaggcgatgactctgtagtttttggctggaactggaaggatggagtttcggattgccagctttgtgtctttgtgcagccatccactgtgtcgtggagagcaggctcttgagcgctgagtcctgagtgaatgactcgtgcaggcggggaggggagctagggttggccttggacccctgggagtgcctagggagagtcaccacttctcgctgcaggagcccagggagactcaaaagtgttgacttttgagctgccagaggaggagaaggggctaccccggctgggggacaggagcaagaagattccaggcagggagaagcaggaacaggggtgagggaagggaagggccatggcagaaaacccaggagacagggaagctggaggtgcagcaggtgcagagaggcctcctaggtgaggctgatctgtaggggccccatgaggaagaaacatttcctgtccccaactcacctggtgacatcaccccatcttctcatacactacagttgaaccacatgagccttttttgttggtttgtttttgtttttgagacggagtcttgctctgttgcccaggctggagtgctgtggtgcaatctcggctcactgcaacctctgcctccctggttcaagcgattctcctgcctcaggctccctagtatccctagtagctgggactacaggcgcgcgccaccatgcctggctaatttttgtatttttagtagagacaggttttcgccatgtcggccaggctgatctcgaacttcttacctcaagtgatccacccgccccggcctcccaaagtgctgggattacaggtgtgagccaccgcgcccggccgaccatgcaagcttttctgacggttcctgaaaccaccgagttggttctaccccaggaccgacgcacactctgtccctgctgcatggaattcttccctctggtcttgacatgactgggaaggcttgcgtgcgcatgtcgccctctgtcgtccaccattgtccccatcttgcaaggccaagaggaggttctccactaagggcacatggccagtgggactccagtgtccctgctcttcacggcgccagcaaccccgttccctgtgccgcctcgctcgcctggtcctttcgtgctccccagcactggcctcctggagcccagggccaccagtgacgctttggtctctagtcctttccagtgcctcttccttcccccagacaccagtgagaacagggcctgccgtgtgccggtcagggctgagctctcgagtctcttgccaccaacagctccgacttgacccagggtgtctctacctccaggcggctctgtgacctccggcaagtggttccagcccttctgggcttcagtctcctcatctgtcacttgggcacaatagaagcaactacctcccagtgaaggagtccatgagagggcccgacttctcggcctcagcactgggccacatgcacagtcaccacttgctccactctggcatctccatggggacaatgcccgcaggcacccccatttcacagataaggaaagcgaggcccaggggtgaaatcagttgcccagggtgacacagccaggaagcagaggagctgggatttgaatggaagcttaattcaggagcccgtgagcctccccagcccctcccaatggtgacagctccttttctgcttcactctgagcacctcatgtgtgcccagccctgggctgggacacagcagtgaccgagacagcccattcctgccctcatgggggtcccaggtcaggcacagtggctcacacctgtaatcccagcactttgggaggctgaggtgggcggatcgcttgagatcgggagttcaagatcagcctgggcaacatagcaataccctgtctctacaaaaaaaattagaaattaggcatatggtggtacatgcctgtagtcccaactactggggacgctgagctggcagggcacatgcctatagtcccagctacttgggagcctgggaagggggagtggttctattctgaagctgaggccaagccatccaaggccttgcaggtgtgctgaggaacccatatcttctcagggcacgagggagccatggcaggttctgggcagggggtcaacagggtcaggtttgtgctttaacatgatccctctgtctgctgtctgtgaggtcacttgaagttggggcatgagactagagaggaggctgtgggtagagaaactgggggggtggcccaggagatgggaaggatggttagaaagatacttgagggtctcatggcctcagttccaacagtccctggaactcagaggccagagattctaagtcactcactctagatggctgcttttccctctgggcttcagtctcccccttgattgaatgaggggataacactgaccagagtggtaatggtagtgattttttttttcttttcttcccctgccccacctcacatacctctgccctgagacgcagtctctgttgcccaggccagagtgcagtggcacagtgtcagctcacctcaacctccaccttctgggttcaagtgattctcctgtctcagcctcccaagtagctgggattacaggcacgcactgccacacccggctaatttttgtatttttgcgtcgtggcacatgcgtgtaatcccaggtactcgggaggctgaggcaggagagtcacttgaacccgggaggcagaggttgcagtgagccgagatgacgcctttgcactccagcctgggcaacaagagcaaaacgccccatctcaaaaaaaaaaaaaaagagagagagagggagagatgggggtctcgccatgttgccccagctggtctcagactcctgggctcaaacaaccctcctgcctcagcctcccaaagtgccaggattacaggcgtgagctactgtgccccgcccgtgtgatggtgattcaacaaccagtggggggttcggggattcatttgcttcatctcctctgggaaggagagtcacacagtcgcttgcccgagcccatggggaccagctgcagcctacttctgatctcagcctccccagaagatgccaccagggcactggccatgaactcacggcctctctcacacccaccaggctcatcttgggggttgccgcctaacactcagcccctctgagagctccacccagccatgcctgcaggtatgaaaggcccctattcctgcagctccagagagctggctccaggctggctccatgctagcaggccagcctgctcccactgtggggcccctagtctgcccctctggtcatcttggtctgggaagcatcttcgcacctgctttgctctgtgctgtctcagcttctctgtgtgccctcagtctcgtggcccccaacctcccttcccttctccacgtgtcttcctctccagggctgcaccctaggagattgctcgatcgtggtggatttctcaactgtgaatcttcagtccctcttcccccttcatttctgtctctgcagatgtgttgtttctttttttttttttcttttttttttttttttgtctttttgagatgaagtcttgcactgtctcccaggctggagtgcagtggcacaatcacaatctcagcttactgcaacttccgcctcccgggttcaagcgattctcctgcctcagcctcctgagtagctgggactacaggtgtgcaccaccacactcagctaatgtttgtatttttagtagagacagggtttcaccatgttggccaggctggtctcgaacctccgacctcagacgatccacccacctcagcctcccaaagtgctggaattacaggtgtgagccaccgtgcccagcctctttttttctttaaaaattttttaggccgggcgcggtggctcatgcttgtaatcccagcactttgggaggccgaggcaggcggatcacgaggtcaggagatcgagaccacggtgaaaccccttctctactaaaaatacaaaaaattagccaggcatggtggcgggctcctgtagtcccagctactcggagaggctgaggca[137 bp omitted]atctctgttgcccacgttggagtgcagtggcgtgatcatagctcagtgtaaccttgaccttctgagctcaagtgatcctcctgcctcagcctcccaagtagctgggactataagcatgtgccatcatgcctggctacgtttttaaatttatttatttgttgtttgtttgcttattgggacagattctcactctgtcactcaggctggagtgcagtggcactatcatggctcactgcagcctccacctcctgggcttaagcaatcctcccacgtccacccccttagtacctgggactacaggtgtgcaccacctcacccaactaatttttgtattcgctatgtttcccaagctggtttcgaattcctgggctcaaatgaacccactttggcctcccaaactgctgggattacaacaagcatgagccactgtgcctggccttgatttttttttttttttttatgataatctgtagttagatgaagtttttaaattttttgtagagatggggtctcactatgtcacctaggcttgtctccaactgctgacctcaagctgtcctcttgccccagccctccaaagcattgggattactggcatgagccattgcatctggctttttttttttttttttttttttttttttttttttgagatggggtctcaccatgttgcccgggctggcttcgaatgcctaggctcaagcaatcctcccttctcagcctcccaaatagctgggattacaggcacgtgccaccacgccaggcttgttttctttccctgtccctccctctctatttcccactctcttcctccccaattcttctggccctataaaatcacatttgtggcctgtaccctgctaggctcgaaagacaccaaagtgaatccatctccatcctgaggcttgaaaaggcagcccaaaggtggcagttctcttgttcagcaagcactccctacggtggagggacacaggaacgcagacttggacctcagtgcagcaagtcccagccacagctgagcactcgattcctcacaaccccaagaggcagttaggttcacagagagatgatgccagcgtccatggtcaccagccagcctgtggcagggctgggattcgaacccaggctgtgcatatttacccactctacccaatggcctctcagcagcagagtggctcagagcctgggtttgggaggtgtggaggcttggattctgcccttgacacattttgtgagcatgagtgagtgacttaccctgtaagcttctataagtggtggtgaccccctctgtaagtgggggtggataaatgctgaccacatgggcttgtgtcgaccagatgaggtccttcaggtaatgcagtcatagcagggcctgggacgctgacctcagcggtagggaacccctgggcgatgggttaggagaaaggagcccttgagggaggcctgagagcaagcccaagcctccagccggggtgagcctagagggcttcctggaggtggagtctagcctggcactcagggtgggtggaaactgatcgtcattttgcccacaggaatcctcgtagcccactacctccagagcatcacgccttgcctggccctgggtggagagctggtctaccaccggcggcctggagaggagggcactgtcatgtctctagctgggaaatacacatgtgagcctggcgcctgggtccgagggtggaggggctgggcccctggactcctcctgggtctgagggaggacgggctagggccctggacactcaggtctgagggaggaggcctgggttcccagatgcccaaatccccttggtaatgagaccccgcctccaccccactctctgacagtgaacaactggttggcaacggtaacgttgggccaggcgggcatgcacgcaacatactaccacaaagccagtgaccaggtgagtgggtgcagggactagctggtgctgccaggggctgctgggcctggaagtccaggtggggccacttgctaattctcatgtgttgctccggcccctccagctgcaggtgggtgtggagtttgaggccagcacaaggatgcaggacaccagcgtctccttcgggtaccagctggacctgcccaaggccaacctcctcttcaaaggtaaaggtctcggttcccctacgcgggaaacaggcaggaggtgactcaactctgagtggatgtgtgggccaccacaggtgctggaggacagtgtgctgccaccct[143 bp omitted]actccgtctctactaaaaatacaaaaacaaaattagccgggtgtggttgcgggtgcctatagtcccaactactgaggctgaggcgggaaaatggtatgaacccaggaggcggagcttgcggtgagccgagatcgtgccaccgcactccagcctgggtgacagagcaagactccatctcaaaaaaaaaaaagtaggtggacaaccctctactatgttttatgcttggaaaaaaaaagtaggtagagcagccaggcgtggtgactcacgcctgtaatcccagcattttgggaggccaagccaggtagaatacttgaggccaggagttggagaccagcctggccaacgtggtgaaatcccctctctactaaaagtacaaaaattagccaggtgtggtagcgtgctgcaactgtagtccccgctacttaggaggctgaggcacaagaatcacttgaacctgggaggcggaggttgcagggagttgagactgcaccactgcactccagcctgggtgacagagtgagactccatctccaaaaaaaataaaatgaaataaataaataaatgttaaaaaaaatctggtggagcatctgatgggtgtttgggccaagctggagctttgtccatcccctcttatttttctgcacttgactctcttatttttctgagactggtctccctctgtcgcccaggctagagtgcagcagtgcaactgcggctcactgcagcctccacctcccgggctcaagcagccttcccacctcagcctcctgagtagctaggaccacaggtgtatgccaccaggcccagctaatttttttgatagttttgggagacatgggggtttcaccatgttgcccaggctggtctcgaactcctggactcaagccttggcctcccaaagtgctgggattataggtgtgagccaccacacccagccagggtagaaggcactttggaagcctcgagcctgccccattcatcttacgttagtggaaactgaggcttccagaggtttcaaggtcacaactaaatccagaacctcatctcaggcacactggtcgtagtcccaatgtccagtcttaagtcttcttggatatctgtggctcacagattttgggtgtttgagcctcctgctgagcactgctggggccacagcggtgaccagccctgtcttcacgggactcagtgagaggaacagattcatccgcagagtgggcaggactaggttgggggaacccaggggtctagagggcttttcagagggcaggggtcactgagcggagagcagaggaggagtgagccatttgctccagcgtgaagttgttggtgtgatggggtttcagggtggcaggagcagtgtggttaaaggtctggaagctgtcggcatgtggctggtatccaaggtggccaggaactctgcatggatatggtgggaagctggcacgcctctcacctcagctcttccctgcaggctctgtggatagcaactggatcgtgggtgccacgctggagaagaagctcccacccctgcccctgacactggcccttggggccttcctgaatcaccgcaagaacaagtttcagtgtggctttggcctcaccatcggctgagccctcctggcccccgccttccacgcccttccgattccacctccacctccacctccccctgccacagaggggagacctgagcccccctcccttccctccccccttgggggtcgggggggacattggaaaggagggaccccgccaccccagcagctgaggaggggattctggaactgaatggcgcttcgggattctgagtagcaggggcagcatgcccagtgggcctggggtcccgggagggattccggaattgaggggcacgcaggattctgagcaccaggggcagaggcggccagacaacctcagggaggagtgtcctggcgtccccatcctccaaagggcctgggcccgccccgagggggcagcgagaggagcttccccatccccggtcagtccaccctgccccgtccactttcccatctcctcggtataaatcatgtttataagttatggaagaaccgggacattttacagaaaaaaaacaaaaaacaacaaaaaatatacgtgggaaaaaaaacgatgggaggcctccgttttctcaagtgtgtctggcctgttttgagcatttcatccggagtctggccgccctgaccttcccccagccgcctgcagggggcgccagagggccggagcacggaaagcagcggatccttgatgctgccttaagtccggctcagaggggcgcagcgtggcctggggtcgctatcttcccatccggaacatctgccctgctgggggacactacgggccttcccttgcctgagggtagggtctcaaggtcacttgcccccagcttgacctggccggagtggctatagaggactttgtccctgcagactgcagcagcagagatgacactgtctctgagtgcagagatgggggcagggagctgggagagggttcaagctactggaacagcttcagaacaactagggtactaggaactgctgtgtcagggagaaggggctcaaggactcgcaggcctgggaggaggggcctaggccagccatgggagttgggtcacctgtgtctgaggacttggtgctgtctggattttgccaacctagggctggggtcagctgatgcccaccacgactcccgagcctccaggaactgaaaccctgtctgcccccagggtctggggaaggaggctgctgagtagaaccaaccccaggttaccaaccccacctcagccaccccttgccagccaaagcaaacaggcccggcccggcactgggggttccttctcgaaccaggagttcagcctcccctgacccgcagaatcttctgatcccacccgctccaggagccaggaatgagtcccagtctctcccagttctcactgtgtggttttgccattcgtcttgctgctgaaccacgggtttctcctctgaaacatctgggatttataacagggcttaggaaagtgacagcgtctgagcgttcactgtggcctgtccattgctagccctaacataggaccgctgtgtgccagggctgtcctccatgctcaatacacgttagcttgtcaccaaacatacccgtgccgctgctttcccagtctgatgagcaaaggaacttgatgctcagagaggacaagtcatttgcccaaggtcacacagctggcaactggcagagccaggattcacgccctggcaatttgactccagaatcctaaccttaacccagaagcacggcttcaagcccctggaaaccacaatacctgtggcagccagggggaggtgctggaatctcatttcacatgtggggagggggctcccctgtgctcaaggtcacaaccaaagaggaagctgtgattaaaacccaggtcccatttgcaaagcctcgacttttagcaggtgcatcatactgttcccacccctcccatcccacttctgtccagccgcctagccccactttcttttttttctttttttgagacagtctccctcttgctgaggctggagtgcagtggcgagatctcggctcactgtaacctccgcctcccgggttcaagcgattctcctgcctcagcctcccaagtagctaggattacaggcgcccgccaccacgcctggctaacttttgtatttttagtagagatggggtttcaccat[134 bp omitted]ctttctttctgggatccaggagtccagatccccagccccctctccagattacattcatccaggcacaggaaaggacagggtcaggaaaggaggactctgggcggcagcctccacattccccttccacgcttggcccccagaatggaggagggtgtctgtattactgggcgaggtgtcctcccttcctggggactgtggggggtggtcaaaagacctctatgccccacctccttcctccctctgccctgctgtgcctggggcagggggagaacagcccacctcgtgactgggggctggcccagcccgccctatccctgggggagggggcgggacagggggagccctataattggacaagtctgggatccttgagtcctactcagccccagcggaggtgaaggacgtccttccccaggagccggtgagaagcgcagtcgggggcacggggatgagctcaggggcctctagaaagagctgggaccctgggaacccctggcctccaggtagtctcaggagagctactcggggtcgggcttggggagaggaggagcgggggtgaggcaagcagcaggggactggacctgggaagggctgggcagcagagacgacccgacccgctagaaggtggggtggggagagcagctggactgggatgtaagccatagcaggactccacgagttgtcactatcatttatcgagcacctactgggtgtccccagtgtcctcagatctccataactggggagccaggggcagcgacacggtagctagccgtcgattggagaactttaaaatgaggactgaattagctcataaatggaacacggcgcttaactgtgaggttggagcttagaatgtgaagggagaatgaggaatgcgagactgggactgagatggaaccggcggtggggagggggtggggggatggaatttgaaccccgggagaggaagatggaattttctatggaggccgacctggggatggggagataagagaagaccaggagggagttaaatagggaatgggttgggggcggcttggtaaatgtgctgggattaggctgttgcagataatgcaacaaggcttggaaggctaacctggggtgaggccgggttggggccgggctgggggtgggaggagtcctcactggcggttgattgacagtttctccttccccagactggccaatcacaggcaggaagatgaaggttctgtgggctgcgttgctggtcacattcctggcaggtatgggggcggggcttgctcggttccccccgctcctccccctctcatcctcacctcaacctcctggccccattcaggcagaccctgggccccctcttctgaggcttctgtgctgcttcctggctctgaacagcgatttgacgctctctgggcctcggtttcccccatccttgagataggagttagaa[137 bp omitted]gcctcagcctcccaagtagctgggactacaggcacatgccaccacacccgactaacttttttgtattttcagtagagacggggtttcaccatgtt[144 bp omitted]acggggcagctgtgatctttattctccatcacccccacacagccctgcctggggcacacaaggacactcaatacatgcttttccgctgggcgcggtggctcacccctgtaatcccagcactttgggaggccaaggtgggaggatcacttgagcccaggagttcaacaccagcctgggcaacatagtgagaccctgtctctactaaaaatacaaaaattagccaggcatggtgccacacacctgtgctctcagctactcaggaggctgaggcaggaggatcgcttgagcccagaaggtcaaggttgcagtgaaccatgttcaggccgctgcactccagcctgggtgacagagcaagaccctgtttataaatacataatgctttccaagtgattaaaccgactcccccctcaccctgcccaccatggctccaaagaagcatttgtggagcaccttctgtgtgcccctaggtactagatgcctggacggggtcagaaggaccctgacccaccttgaacttgttccacacaggatgccaggccaaggtggagcaagcggtggagacagagccggagcccgagctgcgccagcagaccgagtggcagagcggccagcgctgggaactggcactgggtcgcttttgggattacctgcgctgggtgcagacactgtctgagcaggtgcaggaggagctgctcagctcccaggtcacccaggaactgaggtgagtgtccccatcctggcccttgaccctcctggtgggcggctatacctccccaggtccaggtttcattctgcccctgtcgctaagtcttggggggcctgggtctctgctggttctagcttcctcttcccatttctgactcctggctttagctctctggaattctctctctcagctttgtctctctctcttcccttctgactcagtctctcacactcgtcctggctctgtctctgtccttccctagctcttttatatagagacagagagatggggt[131 bp omitted]tctgccctctgcatctgctctctgcatctgtctctgtctccttctctcggcctctgccccgttccttctctccctcttgggtctctctggctcatccccatctcgcccgccccatcccagcccttctccccgcctcccactgtgcgacaccctcccgccctctcggccgcagggcgctgatggacgagaccatgaaggagttgaaggcctacaaatcggaactggaggaacaactgaccccggtggcggaggagacgcgggcacggctgtccaaggagctgcaggcggcgcaggcccggctgggcgcggacatggaggacgtgtgcggccgcctggtgcagtaccgcggcgaggtgcaggccatgctcggccagagcaccgaggagctgcgggtgcgcctcgcctcccacctgcgcaagctgcgtaagcggctcctccgcgatgccgatgacctgcagaagcgcctggcagtgtaccaggccggggcccgcgagggcgccgagcgcggcctcagcgccatccgcgagcgcctggggcccctggtggaacagggccgcgtgcgggccgccactgtgggctccctggccggccagccgctacaggagcgggcccaggcctggggcgagcggctgcgcgcgcggatggaggagatgggcagccggacccgcgaccgcctggacgaggtgaaggagcaggtggcggaggtgcgcgccaagctggaggagcaggcccagcagatacgcctgcaggccgaggccttccaggcccgcctcaagagctggttcgagcccctggtggaagacatgcagcgccagtgggccgggctggtggagaaggtgcaggctgccgtgggcaccagcgccgcccctgtgcccagcgacaatcactgaacgccgaagcctgcagccatgcgaccccacgccaccccgtgcctcctgcctccgcgcagcctgcagcgggagaccctgtccccgccccagccgtcctcctggggtggaccctagtttaataaagattcaccaagtttcacgcatctgctggcctccccctgtgatttcctctaagccccagcctcagtttctctttctgcccacatactggccacacaattctcagccccctcctctccatctgtgtctgtgtgtatctttctctctgcccttttttttttttttagacggagtctggctctgtcacccaggctagagtgcagtggcacgatcttggctcactgcaacctctgcctcttgggttcaagcgattctgctgcctcagtagctgggattacaggctcacaccaccacacccggctaatttttgtatttttagtagagacgagctttcaccatgttggccaggcaggtctcaaactcctgaccaagtgatccacccgccggcctcccaaagtgctgagattacaggcctgagccaccatgcccggcctctgcccctctttcttttttagggggcagggaaaggtctcaccctgtcacccgccatcacagctcactgcagcctccacctcctggactcaagtgataagtgatcctcccgcctcagcctttccagtagctgagactacaggcgcataccactaggattaatttgggggggggggtggtgtgtgtggagatggggtctggctttgttggccaggctgatgtggaattcctgggctcaagcgatactcccaccttggcctcctgagtagctgagactactggctagcaccaccacacccagctttttattattatttgtagagacaaggtctcaatatgttgcccaggctagtctcaaacccctgggctcaagagatcctccgccatcggcctcccaaagtgctgggattccaggcatggggctccgagcccggcctgcccaacttaataatacttgttcctcagagttgcaactccaaatgacctgagattggtgcctttattctaagctattttcattttttttctgctgtcattattctcccccttctctcctccagtcttatctgatatctgcctccttcccacccaccctgcaccccatcccacccctctgtctctccctgttctcctcaggagactctggcttcctgttttcctccacttctatcttttatctctccctcctacggtttcttttctttctccccggcctgcttgtttctcccccaacccccttcatctggatttcttcttctgccattcagtttggtttgagctctctgcttctccggttccctctgagctagctgtcccttcacccactgt[137 bp omitted]acctccacttcccagattcaagcaattctcctgcctcagcctccagagtagctgggattacaggcgtgtcccaccacacccgactaatttttgtatttttggtagagacaaggcttcggcattgttggccaggcaggtctcgaactcctgacctcaagtaatctgcctgcctcaccctcccaaagtgctgggattacaggcatgagccacctcacccggaccatccctcattctccatcctttcctccagttgtgatgtctacccctcatgtttcccaacaagcctactgggtgctgaatccaggctgggaagagaagggagcggctcttctgtcggagtctgcaccaggcccatgctgagacgagagctggcgctcagagaggggaagcttggatggaagcccaggagccgccggcactctcttctcctcccaccccctcagttctcagagacggggaggagggttcccaccaacgggggacaggctgagacttgagcttgtatctcctgggccagctgcaacatctgcttgtccctctgcccatcttggctcctgcacaccctgaacttggtgctttccctggcactgctctgatcacccacgtggaggcagcacccctcccctggagatgactcaccagggctgagtgaggaggggaagggtcagtgtgctcacaggcagggggcctggtctgctgggcctgctgctgattcaccgtatgtccaggagctggagcagcaccctctcagagcctcagtttccccagatgtcaatgagagaatcagcatcagccacatctcccacctgaagaatcgaaccttgagttctcacctttaagaatttttttttttttttgagacagtgccttgctcagtcgaccacgctggagtgcagtagcacgatcatcaatcactgcagcctccaactcaagcaaccctcctgcctcaacctcctgagtagctggggccacaggcacccaccaccatgcctggctaattctttcttttttgagatggagtctcactctgtcgcccaggctggagtgcagtggcaccatcttggctcaccgcaacctctgccccccgggttcaagcaattctcctgcctcagcctcctgagtagctagaattacaggcgcacaccaccacaccaggctaatttttgtatttttagtagaaacgaggtttcaccacggtggtcaggttggtctcaaactcctgacatcaggtgatccacccgcctcggcctcccaaagcactgggattacaggagtgagccaccatgcctggccatattttaaacttttttgtagagatggggtcttactatgttgcccaggctgatctcaaactcttgggctcaagcagatcctcctgccaaagcttcccaaagtagttggattacaggtgtgagccaccacgccccaccaacctatgaagatgtctaagcagacagggtgccctatctcaccacatccccagtcagatccagaggtgggacaaggatgggaaggaggttccagaacaaaggctggcagggagtcgtatgggacaggagctgacccagcaaccatccacagagacatcctggagcctgggaaggagaaggacaaagagcccccttttttaaattttttttatgtttttgagacggagtctcactctgtcacccaagctggagtgcagtggcacaatcttggctcactgcaacctccacctcatgggttcaaacgactctcctgcctcagcctcctgagtagctgggaccacaggtgcacaccaccatgcctggataatttttgaatttttggtagagacggagtttcaccatgttggccaggcaggtctcgaactcctgacctcaagtgctccgcccaccttggcctcccaaagttctgggaatacaggcgtgagccactgcaaccagccagtagcccccatctttgcccctcgctgagccctactggatgttcttggttatgcgacagtttccccatctattaaagagaaacccctatagcagaggggaggatgaggttggaaaagcaggagcattgttatgctattcttgtggggtctgggaagcagacatctgggtggatgtttggggggtgctgggcttagttggggaagtaggggggcccctggggctgacagggactggaagctctgagctggccagagggatgttgcaatcctgccagggtcttgtctatgctgtccttttcacaaccatccccctactgccaggctgacacgtggttgcgggggcacaaggccagccaacctagagtctgaggctaggcggaggacaccctccccaccagctgccagggtcactggcggtcaaaggcagctggtggggaaggcattggactccagccttgggggacggatgtagtgatggtgggaagcaggcttggtgccaggaggggcgtcagagggtgaataaaagcagatagagtgtttgggggaggtagccagccaaagggggtgaggcccggtggaagggaagaagggacatacacgcagagctttgcagctgagggttttaattttttgagatggggtctctgtcccaccaggctggagtgcagtggcacaatcacagctcactgcagcctcgaactcctgggctcaagcaatcttcctacctcagcctcttgagtagctgggactacaggcatgcgccaccacgctcggctaatttttgaacttttttgtagagatgaggtctccctatattgcccaggctggtctcgaactcccaggctcaagtgatcctccctcttcagcttcccaaagtgctgggattacaggcatgagccaccatgcctggctaatgcaggtgaggtttttgcagtgtcatccagctaaggcgacccgttcccctcccaaaaaagggagactgagaaccatgaagttaagagcccagagaatatcacggtggtctggggtgcttcaagggctggtctggaataaattggaggtggcacgcagggtaggagcgccgggccaactgggagacccagcaacataaaggaaaagttgttggggctgaggaggcttgctgagagaggggaagtgagggaaagaggtgatctagggacacggtgtgaatgagggggggatgagatcacagggttattactgggagacccctgagggaagatggccacagggacaggacaaggctgtcttcttaagggaggagaccacccctcatattgtcttatgcccaatttctgcctccaaagaaagaaaaagtaaaaactaaaaggcagaaatgaaatccacaagcagacagcccgcgccacaccctgggcctggtggttaaagattgacccctgacctaatccgttaggttatctatagattacagacattgtatagaaaagcactgtgaaaatccctattctgttttgttccgatctaattaccggtgcatgcagcccccagtcacgcatcccctgcttgttcaatcgatcacgaccctctcacgtgcacccacttagagttgtgagcccttaaaaggaacagggattgctcactcggggagctcggctcttgagacaggaatcttgcccattccccgaacgaataaaccccttccttaactcagcgtctgaggaattttgtctgcggctcctcctgctacattctgagtggggaaagggactaaggtggtctgaggaccccacagagtcaggaagattgagaggtgagagtgctgaacggggaggggctttggggctaagggaagtgcccgggaccccacctgaccccaacgctcacgggacaggggcagaggagaaaaacgtgggtggacagagggaggcaggcggtcaggggaaggctcaggaggagggagatcaacatcaacctgccccgccccctccccagcctgataaaggtcctgcgggcaggacaggacctcccaaccaagccctccagcaaggattcaggttggtgctgagtgcctgggagggacacccgcctacactctgcaagaaactcaaaaagggagatgaggggatcgtgggagggaggtagggagggaggagggtgccactgatcccctgaacccctgcctctgcctccagagtgcccctccggcctcgccatgaggctcttcctgtcgctcccggtcctggtggtggttctgtcgatcgtcttggaaggtaaaagtgggatgggagaattgcggagttggagatttggaagagtgaaggtggctacaggcctggggtcccggcttagaggacctctgagagctccggggccccttctgggtcgtggttgcctcatcgtggtcgggtgggtctccaggttctcccaggctcagtcccgcaggcgccaaatctgcgcaggagagcactagcaaccgatgacgtattgaggcccacacctctgggattggctgtcctgcttcgacagccttgaaagtgggtaagctgggtggggggctctgggagaggtcagtgctgagtaaggcaattcccagcagcttgagccccaccaggtcactccagtattcctccccattctttttttttttttttttttttctcttgagacggagtctcgctctgtcgccgaggctggagtgcagtggcgcgatctcggctcactgcaagctccgcctccctggttcacgccattctcctgcctcagcaggactacaggcgcccgccaccgcgcccggctaattttttgtattttcagtagagaca[138 bp omitted]ccatcccggtatccc[136 bp omitted]acttcgtctctactaaaaatacaaaaaaattagccaggtgtggaggcacgcgcctgtaggcccagctactcgggaggctgaggcaggagaatcacttgaacccgggaggcggaggttgcagtgagccgagatcataccactgcactccagcctggctgacacagcaagactccgtctcaaaacaaaacaaaacaaaaatagctgggtgtggtggtgcacacctgtaatcccagctacttgggaggctgaggcaggagaactgcttgaacccgggaggtggtggttgcagtaggccgagatcatgccactgcactccagcttgggctacagagcaagactccatctccaaaaaaaaaaaaaaaaaaacaaattttgaacccctgcccatcttcctggcaggcccagccccagcccaggggaccccagacgtctccagtgccttggataagctgaaggagtttggaaacacactggaggacaaggctcgggaactcatcagccgcatcaaacagagtgaactttctgccaagatgcggttagaacccttcccagggcacgggagagctggggtgtgtttttgggtggagccctggcagatggtccaagatgaacagattgaaaaaaaaacaagtcctggagaggctgacaacatccctctggtcacacagctagatctcaaggtgctcagacttcaaggacagtttccctgactcccatccaggccatattttaaaagatggtcttgggctgggcacggtggctcatgcttgcaatcccagcacttagggaggccgaggtgggctgattgcctgaggtcaggagttcgagaccagtctgaccaacatggtgaaaccttgtctctactaaaaatacaaaaaaattaggcaggcatggtggcgtgcacctgtaatcccagctagtcgggaggctgaggcaggggaattgcttgaaccagg[138 bp omitted]tatgggaggctgagatgggaggattgcttgagcccaggagttcgagaccagcctgaccaacatggcgagatcctgtctccatttaaaaaaaaaaaaaaaaagatggttttgtgaggtaatgaaaatgaaggccccaagcttggccagacctgggtccccaggctggagtagcaccccttcctgtgtgatcttgacagaggggcattactgtgagcctcagtttcctctcctataaactggtggttctacagggaagtaaaggagcaggcctacagggtgtctggtacatgtagatgctcagtatatcatgaaacccacccttgccccctttggcaagttagagagtcattcgttctttcaaaaatatttactgagcatctgctaagtgctggaaactgtttcaatgtggggaataaaacagtgaagaacgtgccgagcacggtggctcacacctgtaaccccaccactttggaaggccgaggtgggtggatcacttgaggtcaggagtgcgagaaccccgtccctaatagaaatgcaaaaaaaattagctgggcatggtggcccatgcctgtagtcccagctccttgggaggctgaggcgagaggattgcttgagcccaggagatctaggctgcagtgcgccatgtttgtgccactgcattccagcctgggtaacagaatgagaccctgtctcaacaaaaaaagaaaagaaaagagaagaaaagagaaaagaaagacagggagggagggaggaaggaagggagggagggagggaaaatagagccaggcataaacttagaaagatcgtttggaggccaggcacaatggctcacacctgtaatcccagcactttgggaggccaaggcaagcagatcacctgaggtcaggagttcgagaccagcctaacatggagaaaccctgtctctactaaaaatacaaaattagccgggcgtggtggtgcattcctgtagtcctagctactcgggagcctgaggcaggagaatcacttgaacccgggaggcggaggttgcagtgagccgagatcatgccactgcactccagcctgggcgacaaggcgagactccatgccaaaaaagaaaaaaaactcctggcgcggtggctcacgccagtaatcccagcactgtgggaggctgagcaggcggatcacgaggtcaggagttcgagactagcctgctcaacataatgaaaccctctctgtactaaaaatacaaaaattagctgggtgtggtggcaggcacctgtagtcccagctactcgggaggctgaggcaggagaatggcttgaacctgggaggcagaggttgcagtgagccgagacagtgccattgcactccagtccaggtgacagagcgaaactccatctcaaaaaaaaaaggaaggcattggtagcaagagatggcaggccttgaaagccaggccagggtgaagtgtttcttttttttttttttttttttttctttttaaatttttttttttgagacggagtctcgctctgtcacccaggctggattgcagtggcctgatctcggctcactgcaagttccgcctcccgggttcatgccattctcctgcctcaccctcccgagtagctgggactacaggcacctgccaccacgccagctaattttttgtattcttagtagaatgtagaatttactt[153 bp omitted]gtggtgcgatctcggcttactggaacctccacctcccgggttcaggcaattctcctgcctcagcctcatgagtacttggaactacaggtgtgtgacaccacacatggtattttttgtatttttagtgaagatgacatttcaccatgttgcccaggttggtctcgaactcctgacctcaagtgatcagcctacctcggcctcccaaagtgttgggattacaggcgtgagccaaatgcccagccaagggtaaagtgtttagacttcaacgtgctttggtccatctgggaaactgaggcacagaagttggcccacccagcccagcggtcctcctaatcccacagacagtggggatggagattctgcaaggggaagaggtgggagtcaggtagcaggcagaatttggacagcctgggaggtagctgcacacagtgacccccttccttattcctccccacagggagtggttttcagagacatttcagaaagtgaaggagaaactcaagattgactcatgaggacctgaagggtgacatcccaggaggggcctctgaaatttcccacaccccagcgcctgtgctgaggactccctccatgtggccccaggtgccaccaataaaaatcctacagaaaattctctcctgagtgcttctttactctggggaaggggctgcgggagagggtaggggcttccagagagggcagggtctgcaggagagggcaggggctaaaccttaggtactcctcacaagccctccaatgccctatctacttgccctgtgctgaggatgttttaactccatggtctcaaaagagtcttcctaagaaccctgcaaactgggccttattaatcccataagggcattgaggcccagagaggtgaagttacttgtataaggtcacacagccaggaagtagagaactggaactagattgaaccctcagcctagcaatgtcactatgctacacttttcctagtgtggtctacccgagatgaggggctgaggtttttttttgtttttgtttctgttttgaggcagactcactctctcccccaggatggagtacagtggtgcgatctcagctcactgcaacctccacctcccaggttcaagagattatcctgcctcagcctcccaagtagctgggatttacaggtgtgcgccaccacacccagctaatttttgtatttttagtagagacagggtttcatcatgttggccaggctggtctccaactcctgggcttaagcaatcctcctgccttggcctcccaaagtattagaattacaggcgtgagccactgtgcctggctcttatgtaaaattaaaccacatacacatgagaaacaaccctatgtaattaagatttctttctttttttttttttttttaagagatggagtcacccaggctggagtgcagttgcacaatctccattcactgcagccttgcaacctccaccacctgagttcaagggattctcctgcctcagcctcctgagtagctgggattataggcatgtgccaccacgcccagctaatttttttgtatttttagtagagacggaatttccccatgttggccaggctggtctcaaactcctggccttaaatgatccacccgtcctggcctcccaaagtgctgggattacaggtgtgagccaccgcacccagcttaagatttcataagaaaaatatttgtaagccacatatctaataaccggttaatattcaggctgggtgaagtggctcatgcctgtaatcccagcactttgggaagacaaggcgggcggattacctgaagtcaaaagtttgagacctgcctggccaacatggtgaaaccctgtctctactaaaaatacaaaaaaattagccgggtggggtggcacatgcctgtaatcccagctgcttgggaggctgaggcaagagaatcccttgaacccaggagtcgaaggttgcagtgagccaagatggcgccactgccctccagcctgggagacagagtgggactccatctcaaaaaaaaaaaaaattcaaaatgtataatatacaatcctagttgggacatcaaacactgcagccactgtggaaaacagtatggggtttcctcaaaacattaaagatagaactctcaaatgatccttcaatcccacttctgggtatttattcaaaagaattgaaatcaggaccttgaagagatacctgccctcccatgttcactgcaggtctgctcaatacccaagatatggaaacaacctaaatgtttatcaacagatgaatgggtcaaggaaatgtggtctctacatgtaatggaatgtaacgcatccttaaaaaggaaaccctaaggccgggctctgtggctcacacatgtttttttttttaaattttatttatttatttatttatttatttattttttattgatcattcttgggtgtttctcacagagggggatttggcagggtcataggacaatagtggagggaaggtcagcagataaacaagtgaacaaaggtctctggttttcctaggcagaggaccctgaggccttccgcagtgtttgtgtccctgggtacttgagattagggagtggtgacgactcttaacgagcatgctgccttcaagcatctgtttaacaaagcacatcttgcaccacccttaatccatttaaccctgagtggacacagcacatgtttcagagagcacagggttgggggtaagatcacagatcaacaggatcccaaggcagaagaatttttcttagtatagaacaaaatgaaaagtctcccatgtctacttctttctacacagacacggcaaccatccgatttctcaatcttttccccaacttttcccccctttctattccacaaagccgcgattgtcatcctggccggttctcaatgagctgttgggcacacctcccagacagggtggtggccgggcagaggggctcctcacttcccagtaggggcggccgggcagaggcgcccctcacctcccggacggggtggctgccgggcggagaggctcctcacttctcagacagggcggttgccaggcagagggtctcctcacttctcagacggggtggccgggcagagacgctcctcacctcccagacggggtcgcggccgggcagaggcgctcctcacatcccagacggggcggcggggcagaggcgctccccacatctcagacgatgtgcggccgggaagaggcgctcctcacttcctagatgggatggcggccggacggagacgctcctcacttcccagactgggcagccaggcagaggggctcctcacatcccagacgatgtggctcacgcatgttatcccagcactttcggaggtca[135 bp omitted]agaatcgcttgaacccaggaggtggaggctgcagtgagccgagatcatgccactgcactccagccggggcatcagagcaagactcaatctcaaaacataaaaggaaatcctgaaactgggcacagtggcttatgcgtgtaatcccagcactttggaaggctgaggtgggaggatcacttgaggtcaggagttcgagaccagcctgggtaacatggtgagacaccatctctaccaaaaaaagaagaaagagaataaataaatgtataaatattactccctggggttaatgcatccccttctcccccaaatcaaccctccaaactcctatactctcctgtcttctcactcagcagcctgttagaactcaagtcagattttttgttttttgttttttgagacggagtctcactctattgcccagcctgtgcagtggcaccatctcagctcactgcaacctctgcctcccaggttgaaccgattttcctgctcagtctcccaagtagctgggactacaggcgtgtgtgtgccaccacacccagctaatttttgtatttgtagtagagacggggtttcaccatgttgcccaggttggtctcgaactcctgagctctagcaattagccctccttggcctcccaaagtgctggggttacaggcatgagccaccatggccggcctcaagtcagattatgctcttcctctgctcagaactctcctgattctctcagagtaaacccagaagcacttaccaaggcctacaaacgggacactatgccgtccacgatcgcctcctccctgtctctctctccatcactcacaagcaactctttgctattcctccaatgtactgggcaggttcccatctcagggcccttgcagttactgttcctcttgcctggaatgttcttccccaggggtccagatatctgcctggctccctcctcacttcctccagttctcttccaaaatcatcccctgccagacgtggtggcacacgcctgtaatcctaactctttgagatgccaaggtgggaggattgcttcagctcaggagttcaagatcagcctgggcaatagcaagaccccatccgttctaaaaataaaaataaataaaaaataaaaaataaaaattagctgagcatggtagtggacaccttggggttccagccacgtggcaggctgaggtaggaggatggctttgaatcagggaggttgaggctgcagtgagccatgttctgaattagatactggtgatgatcgtgcaaccttcccaatataggaaaaaccactgaacagtacattttcaaagggtaaatttagccggacacggtggctcatgtctgtaatcccagcacttttggagtccgaggc[131 bp omitted]gaggcaggagaattgcttgaacccgggaggcagaggttgtggtgagccgacatcacaccatcgtactccagcctgggcaacaagagcgaaactccgtctcaaaaaaaaaaaaaataattaagaaattagccaggcgtggtggtgggtgcctgtagtctcagctacttgggaggctgaggcatgagaatcgcttaaacccggcgggtggaggctacagtgagcctagattccaccaccgcactccagcctgggcaactgagtgagactccacctcaaaaaaataaataaaagggtaaattttatggaatgtgaatcataattcaatttttcaacatgcgttaggagggacatttcaaactcttttttaccctagactttcctaccatcacccagagtatccagccaggaggggaggggctagagacaccagaagtttagcagggaggagggcgtagggattcggggaatgaagggatgggattcagactagggccaggacccagggatggagagaaagagatgagagtggtttgggggcttggtgacttagagaacagagctgcaggctcagaggcacacaggagtttctgggctcaccctgcccccttccaacccctcagttcccatcctccagcagctgtttgtgtgctgcctctgaagtccacactgaacaaacttcagcctactcatgtccctaaaatgggcaaacattgcaagcagcaaacagcaaacacacagccctccctgcctgctgaccttggagctggggcagaggtcagagacctctctgggcccatgccacctccaacatccactcgaccccttggaatttcggtggagaggagcagaggttgtcctggcgtggtttaggtagtgtgagagggtccgggttcaaaaccacttgctgggtggggagtcgtcagtaagtggctatgccccgaccccgaagcctgtttccccatctgtacaatggaaatgataaagacgcccatctgatagggtttttgtggcaaataaacatttggtttttttgttttgttttgttttgttttttgagatggaggtttgctctgtcgcccaggctggagtgcagtgacacaatctcatctcaccacaaccttcccctgcctcagcctcccaagtagctgggattacaagcatgtgccaccacacctggctaattttctatttttagtagagacgggtttctccatgttggtcagcctcagcctcccaagtaactgggattacaggcctgtgccaccacacccggctaattttttctatttttgacagggacggggtttcaccatgttggtcaggctggtctagaactcctgacctcaaatgatccacccacctaggcctcccaaagtgcacagattacaggcgtgggccaccgcacctggccaaatttttaatttttttctagagatagggtcttactgtgttgcccaggctggtgtcaaactcctgggctcaagcagatcctcctgcctcagcttcccaaagtggtgggattataggtgtgagccactgcgcccagtcagtagccccctctttgcccctcactgagccctactggatgttcttggttgtgtgacagtttccccatctattaaacagaaacccctatagcagaggggaggatgaggttggaaaatcaggagcattgttattctattcttgtgggatcggggaagcagacatctgggtggatgtttggggaatgctgggctcagttgaggaagtaggggggcccctggggcttacagggactggaagctctgagctggccagagggatgttgcaatcctgccagggtcttgtctatgctgtccctttcacaaccatccccctaccgccaggctgacacgtggttgtgggggcacaaggccagccgaactagagtctgaggctgggctgaggacaccctccccatcagctgccagggtcactggcggtcaaaggcagctggtggggaaggaattggactccagccctgggggacggatgtggtgatggtgggaagcaggcttggtgccaggaggggcatcagagggtgaataagagcagatagagtgtttgggggaggtagccagccaaagggggtgaggcccggtggaagggaagaaggggcatacactcagagctttgcagctgaaggttttaattttttgagatggggtctcactctgtctcaccaggctggagtgcagtggcgcaatcacagctcactgcagcctcgaactcctgggctcaagcaatcttcctacctcagcctcttgaatagctgggactacaggtgtgcgccaccacgctcagctaatttttgaacttttttgtagagatgaggtctccctatattgcccaggctggtctcttaactcctgggctcaagtgatcctccttcctcagcttcccaaagcgctgggattacaggcatgagccaccatgcctggccaatgcaggtgaggtttttagtgtccagctaaggcgaccccttccctttgcaaaaaagggagactgaaaatcatcaagttaagagcccagagaatatcagggtggtctgggatgtttcaagggctggtctgaaagaaattggaggtggcacgcagggcagggttgcggggccaactgggaggccccagcaacataaaggaaaagttgttggggctgaggaggcttgctgagagaggggaagtgagggaaagaggtgatctagggacacggtgtgaatgagggggggatgagatcacagggttattactgggagacccctgagggaagatggccacagggacaggacgaggctgtcctctgagtggggaaaggagctatggtagtctgaggaccccccagagtcagggagattgggaggtgagggtgctgaatggtaaagggcttcggagctaagggaaatggtcaggaccccacctgaccccaacgcccacgggccaggggcagaggagaaaaacctgggtgggcagaaggaggcaatcttccaggggaaggctcaggaggagggagatcaacatcaacctgccccgccccctccccagcctgataaaggtcctgcgggcaggacaggacctcccaaccaagccctccagcaaggattcaggttgttgagtgcttgggagggacacccgcctccactctgcaagaactcataaagggagatgaggggatcgtgggagggagggaggagggtgccactgatcccctgaacccctgcctccgcctccagggtgcccctccggcctcgccatgaggctcttcctgtcgctcccggtcctggtggtggttctgtcgatcgtcttggaaggtaaaagtgggatgggagaattgcggagttggagatttggaagagtgaaggtggctacaggcctggggtcccggcttagaggacctctgagagctctggggccccttcttggtcgtggttgccccattgtggtcgagtgggtctccaggttcgcccaggctcagtccggcaggcgccaaatctgcccaggagagccctagtaaccgatgacgtatggatctccacacctctgggattggctgtcctccttttatagccttgaaagtgggtgatggggcgatgggctgtgggaggaggtcagtgctgagtaaggcaattcccagcggcttgagccccacgcggtcacttcagtatcctccccattctaaccacatgatccccaaggatctccttatctatccccgggatccc[136 bp omitted]accccatctctactaaaaatacaaaacagccaggcgttgtggtgcgcgcttggctacttgggaggctgagacaggagaactgcttgaacctaggaggcggaggttgcagtaagccgagatcgcaccatttgacacagcaagtctccgtctcaaaactacaacaacaacaacaacaacaaccaaattttgcacccctgcctcatcttcctggcaggcccagccccagcctagggggctccagaagtctccaacccctttgatggcctggaggagttaggaaagaccctggaggactacactcgggaattcatcaaccgcatcacacagagtgaacttcctgccaagatgtggttagaacccttcccagggcacgggagggctggggtgtgtttgtgtggagccctggaggatgtccaagatgaacagattgaaaaaaaaaacaagtcccagagaggctgacagcatccttctggtcacacagctagatctcaaggatctcagacgtcagggacagtttcccggactcccatccaggccacattttaaaagatggtcttgggctgggcgccgtggctcacacctataatcctaacactttgggaggcctaggcgggcggattgcctgagatcaggagttcaagaccagcctggccaacatggtgaaaccctgtctctactaaaagtacaaaaaattagcctgacatgggggtgtgcacctgtaatcccagctactcgggaggctgaggcaggggaattgcttgcaccagtaaggtgggggttacagtgagccaagattgcaccactgcactccagcctgggcaacaaagcaacattccgtcacaaaagaaaaaaaaaaaagatggttttgcttaggtacggtggctcacacctgtaatcccagcactgtgggaggattgctgga[139 bp omitted]ctccccagttcaagcaattctctgcctcagtctcctgagtagctaggattacaggcgcccaccaccacgcccggctaatttttttgtatttttagtagagatggggtttcaccatcttggccaagctggtcttgaactcctgaccttgtgatccacccgcctcagcctcccaaagtgctgggattacaggtgtgagccaccatgcccggtgatcctgtctctatttaaaaaacaaaacaaaacaaaacaaaacaaaaagcatacaagccagccccggtgcgatagctcatgcctgtaatcccagcactttgggaggctgagtcgggcagattacctgagatcgggggttcgaggccaagttgggcagatcacctgaggttgggagtttgagaccagcctgaccaacatggagaaactccgtctctattaaaaatacaaaattagtcaggcatggtggtgcatgcctctattcccagctacttgggaggctgaggcaggagaatcacttgaacctgggaggcggaggttgcagtgagctgagataatgccattgcactccagcctgggcaataagagcgaatccacgtctcaaaaaaaaaaaaaaaaattgaaaaaaaaaaagatggtcttgtggggtaatgaaggacacaagcttggtgggacctgagtccccaggctggcatagagccccttactccctgtgtgatcttaagagagaggcattactgtgagcctcagtttcctttcctgtgaaatggtggttctgtggggaagtaaagcagaaggcctatagggtgtctggcacattgtaaatgctcagtacatcttcaaatccacacttgctccctttggcaagttagagagtcattcgttcctcaacacatatttattgagcatctgctaagtgctagaaactgtttcaatgtggggaataaaacagtgaagaatatgccgagcgcggtggctcacacctgtaatcccagcactttggaaggctgaggtgagtggatcacttgaggtcaggagtttgagaaccccatctctactagaaatacaaaaaattacccaggcgtgatggcacacacctgtagtcccagctacttcggagacggaggcaagaggatcacttgagcccaggaggttgaggctgcagtgagctatgtttgtgccactgcattccagcctgggtaacagaatgagaccctgtctcatccaaaaaaaaaagaaagaaagaaagaaagaaagaaggaagggagggagggagggagggaaaatctagtcaggcctaaacttagaaagattgtttggaggccaggtgcagtggctcatgcctgtaatcccagcactttggcaggctgaggcgggcagatcacctgaggtcaggagtttgagaccagcctgaccaacaaggagaaaccctgtctcttctaaaaaaaaaatacaaaaaattagccaggcatggtggtgcatgcctgtaatcccagctactcaggatgatgaggcaggagaattgcttgaacctgggagctggaggttgcggtgagctgagatcgcgccattgcactccagcctgggcaacaagggcataactccgtctcaaaaaaagaaagaaagaaagaaagattgattgtttggagggagaggcaaaggtccaaagtcaagaaggtcgatcaataagcaagagcgggtggcatcccaggcaggggaacagcctgggcatacgcagggaggctggaaagtacctttgaatgagtaggggaacagatagggcaagggcaggctggaagaaagagtgggtagcaagagatggcaggccttgaaagccaggccagagtgaagttttcttttcttttcttttcttttgagacggagtcacgctctgttgcctaggctggaacacggtggtgtgatctcagctcattgcactctccacctcccaggttcaagcaattctcctgcctcagcctcctgagtagctgggattacaggcgtgcaccaccacgggtggctaatttttgtaatttagtaaagacggggttttgccatgttggccaggctggtctcgaactcctgacctccagtgatctgcctgcctcggcttcccaaagtgttgggattacaggcgtgagccaaatgcccagccaagggtaaagtgtttagacttcaacgtgctttggtccacctgggaaactgaggcacagaagttggcccacccagcccagcggtcctcctaatcccacagacagtggggatggagattcagcaaggggaagaggtgggagtcaggtagcaggtagaatttgaacagcctgggaggtagctgcacacagtgacccccttccttattcctccccacagggattggttttcagagacatttcggaaagtgaaggagaaactcaagactgactcatgaggacctgaagggtgacatcccaggaggggcctctgaaatttccaacaccccagcgcctgtactgaggacgccctccatgtgtgtccaatgtggtcacacgcccaggtgtgaccaataaaaatcctatggaaaattctctctggccaggcatggtggctgacgcctgtaatcccagcactttgggaggct[136 bp omitted]aggcaggagaatcgcttgaaaccgggaggtggagcttgcagtgagctgagatcgtgccactgcactgcagcctgggtgacaagagccagactccgcgtcaaaaaaaaaaaagaaaagaaaattctgtctgactgcttcttcactgtggggcaggggtgccggagagggtaggggctgtgggagagggcaggggctgaaccttacggactcctcacaagccctccaatgccccatctacttgccctgtgctaaggatgttttaactctatggtctcaaaagaatcttcctaagaaccttgcaaactgggacttaataatcccataagggcattgaggcccagagaggtgaggctacttgtataaggtcacacagccaggaagtggagaactggaactagattgaaccctcagccaggcaatgtcactatgctacacttttcctagtgtggtctacccgagatgaggggctgaggttttttgttttgttttgttttgttttgaaacagagtttcgctcctcttgcccaggctggagtacaatggcaccatctcagttcactgcaacctccgcctcccaggttcaagggagtctcctgcctcagcctcccaagtagctgggattgcaggtgcgtgccaccatgcctggttaatttttgtatttttagtagagacgaggtttctccatgttgatcaggctggtcttgaactcctgacttcacatgatctgcctgccatggcctcccaaagtgcagggattacaggcatgagccacctcgcctggcctttttttttttttcttgagacagagtctcactctgtaccccaggctggagtgcaggggcatgatctcggctcactgcaacctccgcctcctgggttcaacagattctcctgccttagcctccctagtatctgggattacaggtgtgtgccaccacacccagctaatttttgtatttttagtagagacagcattttatcgtgctggccagtctggtctccaactcctggattcaagcagtcctcctgccttggcctcccaaagtggtgggattacaggcgtgagccactgtgcccagctcttacgtaaaattaaaccacatgcacatgcaaaacaaccctatgtaaaaaaaaaattttttttgagatggagtctggctctgtcacccaggctgaagtgcaatgatgcgatctccactcactgcaacctctgcctcccaaattcaagtgatttttttgccttagcctcctaagtagctgggattacaggcatgtgccaccacacctggctacttttgttgtatttttagtagagacagagtttcaccatgttggccaggctagtctcgaactcctgacatcaagtgatccgcccgccttggcatcccaaagtgttgggactacaggtgtgagccactgcgcccagcttaagattgcataagaacaatatttgaaagccatatatctaataaggggttaatattcaaaatatataagggactcctacaatgcgagtgggaacaccaaacactgcagccactgtggaaaacagtatggggtttcctcaaaacattaaaaatagaactaccaaatgatcctgcaatctcatttctgggtatttattcaaaagaattgaaatcaggaccttgaagagatacctgccctcccatgttcactgcaggtctgcttaatacccaagatatggaaacaacctaaatgtttatcaacagatgaatgggtcaaggaaatgtggtctatacgtgcaatggaatgtaaagcatccttaaaaaggaaaccctgaggccgggctctgtggctcacacatgttatcccagcactttcggaggtcgaggcaggaggatcacttgaggccaggagttggagaccatcctggccaacatggtgaaaccccgtatctactaaaaatacaaaaaaaatcagccaggcatggtggcgggtgcctgtaaacccagctactcaagaggctgaggcaggagaatcactggaacccaggaggcggaggctgcactgagcagagatcgtgccgttgcactccagcctgggcgacaagaacaaaactccatctcaaaaaataaaaaaaggaactcctgaagccaggctcggtggctcccacctgtaatcccagcactttgggatgccaaggcaggaggatcactcgaggccaggagttggagactatcctgtccaacatggtgaaaccctatctctactaaaaatgcaaacattagccaggcatggtggcgtgtgcctgtaatcccagctacttgggaggctgaggcgtgagaatagcttgaaccaggaggtagagactgcagtgagctgagatcatgccactgcactccagcctgggcgtcagag[138 bp omitted]aacactgtctctactaaaaatacaaaaaattagctgggcatg[135 bp omitted]aggagaaaaaaaaaaaaaaaaaaggaaatcctgaacctgggcatagtgtcttatgcctgtaatcccagcactttggaaggctgagatgggaggatcagttgaggtcaggagttcaagaccagcctgggtaacatggtgagacaccgtctctaccaaaaaaagaagaaagaaagagaataaataaattataaatattactctctggggttaatgcattcccttctcccccaaaatcaaccctccaaactcctatactctcctttcttctcactcagcagcctgttagaactcaagtcagattttttgtttttttgttttttgaggcggagtctcactctgttgcccaggctggagtacagtggcaccatctcagtccactgcaacctctgcctcccaggttcaagcgattctcctgctcagcctcccaattagctgggactacaggtgtgtgtgtgtcaccacacccagctaatttttgtatttgtagtagagacggggtttcaccatgttgcccaggctggtctcaaactgcccagctctagcgatctaccctcctcggcctcccaaagtgctggggttacaggcatgagccaccgtgcccagcctcaagtcagattatgctcttcctctgctcagaactctcctgattctctcagagcaaacccagaagaacttaccaaaggcctacaaacaggacactacccggttcacgatcgcctcatccctctctctccatcactcacaagcaactccttgctattcctccaatgtactgggcaggttcccacctcagggcccttgcagttactgttcctcttgcctggaatgttcttccccaggggtccagatatctgcctggctccctcctcacttcctccagttctcttccaaaatcatcccctgccagacatagtggcacactcctgtaatcctaacctttgagaggccaagatgggaggattgcttcagctcagaggttcaagaccagcctgggcaacatagcaagaccccatccctcctaaaaaaaattagctgggcatggtggtgcacacttgtggttccagccacttgggaggctgaggtaggaggatggctttgaatcagggaggttgaggctgcagtgagccatgttccaaattagatagtggtgattgtgcaaccttgccaata[137 bp omitted]aacatggtgaaactccatctttacgaaaaattaaaaaattagccaggcgtggtggcaagtgcctgtagtctcagctacttgggacgctgaggcgggagaatttcttgaacctgcggggcagaggctacagtgagctgagattgccccactgcactccagcctgggcaacagagtgagactccatctcaaaaaaaaaaaaaaaaaaaaagaaaaagaaaaaagggtaaattttatggaatgtgaattataactcaatttttcaacatgcattaggagggacatttcaaacccttttttaccccagccttccctgcaatcacccagagtatccagccaggaggggagtggctagagacaccagaagattagcagggaggagggtgcagggtttcgggggatgaggggatgggattcagaccagggtaaggatccaggggtagagagaaagatttgagagtggttttggggcttggtgacttagagaacagagttgcaggctctgtttttgggcccgccctgcccccttccgacctcttagttcctatcctccagcagctgtttgtgtgctgcctctgaagtccaccctgaatgaccttcagcctgttcccgtccctgatatgggcaaacattgcaagcagcaaacagcaaacacatagccctccctgcgtgctgaccttggagctgcggcagaggtcagagacctctcagggcccataccacttccaacatccccttgatctcttggattttggtggagaggggcagaggttgtcctggcctggttaggtagtgtgagagggtcccggttcaaaaccaccacttgctggttgaggagtcgtcagtaagtggctgcgcccccaccctgaggcttgtttctccatctgtacaatggaaatgatgaagatgcccacctgatagggtttttgtggcaaataagtaagtagtttttttgtttttctttttctttttttttttttttttttgagatggagtctcactctgtcaccaggctggagcgcagtggcgtgatctcggctcactgccaactccacctcccgggttcaagcgattctcctgcctcagcctctgagtagctaggactacaggcgcccgccaccacacccagctaatttttgcatttttagtagagatggggtt[133 bp omitted]agctctgtcacccaggctagagtgcattgagccatcttggctctctgcaacttctgcctcccgggttcaagcaattctcctgcctcaggctcccaagtagctgggattacaggcgcccacaaccatgcctggctaatttttgtatttttagtggagacagagtttcactatattggccaggctgatctcgaactcctgacctcaagtgatctgcctgtgtcagcctcccaaagtgctgtgattacaggcatgagccaccatgccccaccgcaattaagtaaagtaatcatctaaaagccctgccatggttcctgccacacagtgtgtgctggggaagcgcgcacgaattaaacagtagctggcgttgacggggcacctatgcggcattttctgtgcacgatctttactctccctggcaaccctatgaggtagatagtccatgactcccattcatggatgaagaaacaggcccacacaggtaaagcaacttgtaccaggtcataccgctagaaagatgtagagtcagccacgcgcggtggctcatgcctataatcccagcactttcggaggctg[134 bp omitted]gaggcagaagaattgcttgaacccgggagacagaggttgcagtgagctgagatcacgtcactgcactccagcctgggtgactgagcaagactccatctcaaaaagaaaaaaaaacaggccaggagcagtggcttacacctgtaatcccagcactttgggaggccaaggcgtgtggattgcctgaggtcaggagttcaagaccagcctggccaacgtggtgaaaccctgtctatactaaaaatgcaaaaattagctgggtgtggtggcaggcgcctgtagtcccagctactcgggaggctcaggtaggagaattgcttgaacccaggagatggaggttgcagtgagccgagatcgcgccactgcactccaacatgggcaatagagcaagactccatctcaaaaaacaaagaagggagggagggaaggaaagaaaggaaaagaagcaacaggtagagtcaggctctgaaccccacaccaatcataacacaacacacagtaggtttgtttttgttttttattttgggcttttgtttgttgtggagacagcgtcacccaggctgtaatgcaatggtacaatcatagctcactgtagccctgaactcctagactcaaacaatcctcccacctcggcctcctgagtagctgggactacaggggcatgccaccacgcctagctaaattttttttttttatttttagtagagatgaggtctccctatgttgcccagattagtgtcttaactcctgggctcaggtgatcctgccaccagggattacaggcacgagccaccatgctggcccttgttttttgttgttttttttttttttttttgagacggagtctcgctttgtcgcccaggctggagtgcagtggcgggatctcggctcactgcaagctccgcctcccgggttcacgccattctcctgcctc[302 bp omitted]gcctcctgagtagctgagattacaggtgcccaccacgatgcccagctaactttttttttttttttggtatttttagtagagacgggggtttcaccatgttggtcaggctggtctcgaactcctgacctcgtgatccgcccgccttggcctcccaaagtgatgggattacaggcgtgagccaccgtgcccagctttttttttttttttttaagagacggggtcttactatgttgcccaggctggactctcaaactcctgggctcaaggaatccttctaccacagctttctgagtagctggggctacaagcccctgccacagtacctggctgtttttgtttttttataattgtggtaaaatataaacaacatggccgggtgtggtggctcacgcctgtaatctcaacactctgggaggttgaggtgggaggattacttgaacccaggagttcaagaccagtctgggcaacttggcaaaactgtgtttctacaaaaaataaaaatattagctgggcagccaggcgcagtggctcatgcctgcaatcccagcactttgggaggctgaggtggatggatcacctgagaggtcaggagtttgagaccaccctggcca[224 bp omitted]gaggccggagaatcgcttgaacccgggaggcggaggttgcagtgagtcaagatcgcaccattgcactccagcctgggcaacaagagcgaaactatgtctcaaatacatacatacatacaaaaaattagccgggtgtggttgccgcacacctgtaatcccagctacgcgggaggctgaagcaggagaatcgctggaacccgggaggcagaggttgcagtgagccaagatcacaccattgcactctatcctgggtgacggagtgagactctgcctcaaaaaaaaaaaaaaaaaaaaaaaaacttaaccattgcagccatttttaggtgtacagttcagtggcattaagtacattcacactgttgtgcaaccatccccactatttgcaggatgtcttcgtcatcccaaacagaaactctgggtgttttcaatctgctgatgattgctacagaggaattccaggggacatctgttgcgcacctactgtgctcacgctggggcctctgggatggacaggattctgccaaggcagacatctgggtcaagacagtcctgcacagttgttcaggttgtggccaaggttgcgtttgcagatttgccatgtaaaaatacaggatgctcagttacatttgaatttcagattaatagcaaaaaaaactttttggtataattctgaaatatttcatgggacatatttatactaaaacgtcatgcactgttgatttgaaattcaaatgtaattgggcctcctctatttcgtc[212 bp omitted]gaggcaggagaatggcgtgaacctgggaggcggagcttgcagtgagccgagatcgcgccacagcactccagcctgggcgacagagccagactctgtctcaaaaaaaaaaaaaagaatccagtccatagtcccctgagccatgtgccctggggtgcagctgggtccttcaggagaaaaatgctctatttctggcactgggaccgagcctgatgtgggttttttgttggtttttg[212 bp omitted]gtgcacctgcagctctcctgcataggcctcagccgtcctgcatgaggacactgggaggcaggtgctccctatcaaccccgtgttacagttgaacaaactgagccccagaaaagaaaacgtatttgcccaggtcacacggtgaagaagtgagggattcgaagcccaggtccatctgaagccagagtcacccagaggagaaagagttggaattgagaactcaaggaatgcttggaagtgatcgggctcgagcccacctaggaagaaacagaggctggagacatgagactgtgttgctatttcctctcatcaacccttgggccctattgaggccctaccacaagcctggccctgcagcccagtgactaggagaaattagacacaagataataataacagcaatgatcttttttttttttctgagacggagtcttgctctttcgcccaggctggactgcagtggcgcgatctcggctcaatgcaagctccacctcccaggttcacgccattctcctgcctcagcctcccgagtagctaggactacaggcgcctgccaccacgcctggctaatttttcatatttttagtagagatggggtttcaccgtgttagccaagatggtctcaatctcctgacctcgtgatccgcctgcctcggcctcccaaagtgttggggttacaggcatgagccaccgcgcctggccaacagcaatgatctttgagcacctatattgccagtctccacggtaagagctttcttcattttttgttttgttttgtttcaagacagagtcttgctctgtcacccaggctggagtgcagtggtgtgatcgcggctcactgcagccttcacttcccgggttcaagccattctcctgcctcagcctcccaagtagctgggattacaggcacgcatcactacttctggctaatttttgtatttttagtagggacagggtttttca[141 bp omitted]cctcccactttatggaggaggaaactgaggccagcaaatgaggctgtcatgggaggtggagacaggatttgaacctgcctcagtgcaggaggctcaagagcctctgtcttctctcagggcactgtgtgggagggtgagaaggagggaggcccacagaggcatgacctctgattgccactgtcacctgggccctgctctctgaagtctctgccaagcggggaggtggccgggggagggccctgctctgtgcagcctcccctcccccggcccgcagagttgagcacagagggacagaggcacggaacccccagaaatgtccctcctcagaaacaggctccaggccctgcctgccctgtgcctctgcgtgctggtcctggcctgcattgggggtgagaagaagtgggtggagggatgtggggcccacacctggtgggtgtgagtgtggctgtgtgtcctgtggctctgtagccacgtgagacatgagtacggagtgtgtgcgtttcatggcgtgcgtatgcatgtgcgtgtcggggagtgtgtgtgtcggtggctgagagtgaagtgtgaatgtcacattggtacaaactgggatcatctgtgtgtgtgcacgtgcgtgcgtggaagtgggagtatgcagtcgtggtaaaaaagtgcatgtctgtgtgcatatgtgtatttgtgtgcacctgtctctctgtggggtatgtgtgtgcaaaatatttgagtgtgtggacatgtgtgagggggtgagtgtgtgctggtgtgtacgtctgtgttttgcatatgcatttttttttttttttttgagacggagtctcactctgtcacccaggctggagtgcagtggtagcagtggtgcgatcttggctcactgcatcatccgcctacccgtttcaagggattctcctgcctcagtcttcagagtatttgggactacagacacacgccaccatgcctggctaattttttttttttgagacggagtctcgctctgttacccaggctggagtgcagtggcgtgatcttggctcactgcaacgtccgcctcccgggttcacgccattctcctgcctcagcctcccgagtagctgggactacaggagcccaccaccacgcctggctaattttttgtatttttactagagacggggtttcgccgtgttagccaggatggtctccatatcctgacctcgtgatccgcctgcctcggccttccaaagtgctaggattataggcgtgagccactgcgcctggccaatgcctggctaatttttttatatttttggtagagacagggttttgccatgttgcccaggctggtcttgaaatcctgacctcaggtgatccgcccgccttggcctcccaaagtgctgggattacaggcatgagccaccacgcccggccatgtactttatgttaaaatgggatcatattctagatcagcattatccagtagaaatttaaatttttaatacagggccaggcacggtggctcatgcctgtaatcccagcactttcggaggccgaggcgggtggatcgcaaggtcaggagatttgagatcatcctggctaacagatgggtaaaaacccatctctactaaaaatacaaaaaattagccatgcatggtggcatgcgcctgtagtcccagctactcgggaggctgaggccggagaatcacttgaacccgggaggcagaggttgcagtgagccgagatcgcgccactgcattccaacctgggtgacagagcgagactccgtctgaaaaaaaaaaaaaatttaacacgtatgtagacaatgtgcaaggcaccattccatgtgcatcgtatgtagtaactcttaattctcacgataaccctgaggtagatattattaccccgttctacaaaaggagaaacagtcctggggagacaggataagtcaccggccaaggcacacagctagctacatgtggcccccgcgtgacggctggtctctgtaggcgaggctttgtccagatgcgtgggtagaaggtctggcccggaaagaggaactgacagcaaggctaagccaatgtctgcccctgggggcagaaagtcacctcctgctctccctccactgtccacagaggtagctcagacagggtgggggtcacaggagaacgaagggagaagggggtagttcctgggcagcaaaatcaggtggtgaagggaggcatcagaggatggcaattagagaggccattagaggggaaccacaggcagacagggtgacaggagggactactgacacaaggtgaagagatggcccagccggacggggtggctcacatctgtaatcccagcattttgggagcccgaggtgggtggatcacttgaggtcaggagttcgaggccccaacatggcaaaaccccatctcttctaaaaatacaaaaattagccgggcatgatggcagatgcctgtaatccctgctactcgggaggctgaggcaggaaaattgcctgaatccaggaggtggaggttgcaatgagacgagatcatgacactgcactccaccctgggcaacagagcaagagactgactctgtctcataaaaaaaaagaaaaaagaaaaaaaaaaagagatggctgatggttaaagaggggttagcggtcaggggacacataagggtaaaggcaggaggcaagaggactggcagggggctgcccctgggccaccgggagcgacacaggatgagcatggagggaaagggagaaggggattctagggtcccagcctacccaagttgccctctggttccacctagcatgccagccagaggcccaggaaggaaccctgagccccccaccaaagctaaagatgagtcgctggagcctggtgaggggcaggatgaaggagctgctggagacagtggtgaacaggaccagagacgggtggcaatggttctggtgagggtgtgctgggctgggtggtgggaggggactcctgggtctgagggaggaggggctggggcctggacccctgagtctcagggaggaggaaagggtgggagtggggctgtgacccctaggtctgggaggagtggagggttagagctgagagcaggaactcctaggtcacagagaggagcggataaatggggcagagaacacctggggagagctggggcctccactgtgatgtcctctctcctgtaggagcccgagcaccttccggggcttcatgcagacctactatgacgaccacctgagggacctgggtccgctcaccaaggcctggttcctcgaatccaaagacagcctcttgaagaagacccacagcctgtgccccaggcttgtctgtggggacaaggaccagggttaaaatgttcataaaagccaggtgtggttgtggcgggtgcctgtagtcccagctactcaggaggctgaggtaggatgatggcttgagcccaggagttcgagaccagcctgggcaacacagcgagatctcttgggggtaaaacaaaaagaaaaaaaaaagttcatacttctccaataaataaagtctcacctgtgtccctgtctggatccttccccagtgtggccagaaaaaaacccaccccactgcctcccaggaatcaatgagtagaagaggtgacacctgatggggaaggaagagtagggaggtcgggaagggtatcaaggaataacaccctattgtgggcttgcggagaatgggggacttcaaggcgtgtcagtttcaggagggtgagggcaggagcgtgggtggagtcagcaggtccccatgatggccctcactgagagcttcgcccttgtctcctacaagctctgactccattcccagtgggcacccagcacctccaacccctccacagcccccaacccagcctctgtcggaggcgaattctcagagtgagggttccctgtcacttgagagaaggttccctgtgacgtgaccttgggggacgtcattgccctttctgtccccacccaccccctccgcagttctgttggccaggactttggcctagacaaaggatgggggttgtggctgtggagcggaagtgggtctcaaccactataaatcctctctgtgcccgtccggagctggtgaggacagcctgccagagtctggtaagaaagggactcagggtgcggggacaggggggcgtcagcagggagagggcaaagatcgataaagcaggaattttaagaggcacaatattagaagcccgtgttggaaccatgactgtgtgtgtgtgtgtgtgtgtgtgtgtgtgtgtgtgtgtgtgtgagagagagagagagggagatggagtctcgctatgtagcccaggctagactcaaactcctgggctcaagcaatcctcctgcctcagcctccccagtagctgggactacaggtgcaccaccacactccacaaatcacagaatttagaactgtagactatttgagcttctgcttagagttagggtggctgaggtggggaggatcccttgagcccaggagtttgaggatgcagtgagctgtgatcttgccaccgtgttccagcctgggtgacagagaaaccccatttctaaaaaagagaaagaaaaagggataggtacaatggctcatgcctgtaatcccagcactctgggaggccgaggcgggtggatcacttgaggtcaggagttcgacaccagccttaccagcatggtgaaaccgcatctatactaaaaatacaaaaattggccgggtgtggtagcatatgcctgtaatcccagctattccagaggctgagacaggagaattgcttgaacccaggaagcggaggttgcagtgagcccagatcgtgccactgtactctagcctgggtgacagagcaagactcagtcttggcggaaaaaaagaatgaaaaaatttaaaaaactaaaaaagaactgtaggctgggcgtggtggcttacacttgtaatccaaacgctttgggaggcca[134 bp omitted]gaggcaggagaatcgctcgaacccggaagacagaggttgcggtgagccaaaattgcgccatcgcactccagcctgggcgagagaacaagaccttgtcttggaaaaaaaaaaagaattgtagaccatttgcttgtgttctttctccggggatcagatctcaccctctttctgccgtacttcctcatctcctacgtgtggatgatgatattgtgccctgtgcatgttcttcgtcaccaaaagtgcctctctcatagagcaggtgagaactcagtgaggagatgcagggacatgaggtctgacttagggcagagccctaaggtaacacatttgatctactgtaggtccttaatggtgtctgcagagcacctccctgcactgactcagccttagcaaagggcagaggctttgctgtgttccctgctgggcccagaactgtttaggtgctcaagaaagccttctaggctgggctcagtggctcacacctgtactcccagcaccctggggaggccgagatgggaggatcgcttgagcccaggagttccagaccagcctgggcaacaaaacaagtctcccatctctacaaaagaataaaaattagcagctgggcatggtggctcatgcctgtaattccagcactttgggaggccaaggcaggcaaatcacttgaggttaggagttcaagaccagcctggccaacatggtgaaaccccatctctactaaaaatacaaaaatcaggtggggcacagtggctcaagcctgtaatcctagcactttgggaggccaaggtgggcggatcacgaggtcagaagttcgagaccagcctggccagcatggtgaaaccccatctctactaaaaatacaaaatattagccgggcatggtggcaggtgcttgtgattccagctccttgggaggctgaggcagaagaattgctagaaccctggaggcagaggttgcagtgagccgagaacacgccactgcactccagcctgggtgacagagcgagactccatctcaaaaaatacgaaaacaaaaatcagccgggtggtggcgggtgcctgtaatcccagctactggggaggctgaggcaggagaattgcttgaacctgggaggtgggggttgcagtgagccaagattgcaccactgcactccagcctgggcaacagagtgagattccatctcaaaaaagaaaaaaataataattaaaatgttaaaatcaggagtagaatcacagaatgttggaaagtgaggcccaagaagggggctgtgtccaagtccatgcatgggaaacttgactgggacaccgagctcacacagagcaggatctcagtcccccccaccagagtggggcgtgaccacaggaacagccgcctccagtcagcctgccacatgacaccccctcaatgttccaggtctctggacactatgggcacacgactcctcccagctctgtttcttgtcctcctggtattgggatttggtgagtgtgggcttccggggagggaagccttggggaggggaatgagctccaagcatcttcccagcccaggcccttcttacctctgcctctgccctctcctcttcttccttcctcctttccccctgctgcagccccacgggctctcctgacacactctccccctgcagaggtccaggggacccaacagccccagcaagatgagatgcctagcccgaccttcctcacccaggtgaaggaatctctctccagttactgggagtcagcaaagacagccgcccagaacctgtacgagaagacatacctgcccgctgtagatgagaaactcaggtagcacctgcccctggagaaatggggtctggcccataccaccgactgcatccaggacccagaagttcaggccccagcccctcctccctcagacccaggagtccaggcctcagcccctcctccctcagacccaggagtccaggcccccagcccgtcctccctcagacccaggagtccaggcccccagcccctcctccctcagacccaggagtccaggtccccagaccctcctccctcagacccaggagtccaggcccccagcccctcctccctctaaccatctgtgctttctccccagggacttgtacagcaaaagcacagcagccatgagcacttacacaggcatttttactgaccaagttctttctgtgctgaagggagaggagtaacagccagaccccccatcagtggacaaggggagagtcccctactcccctgatcccccaggttcagactgagctcccccttcccagtagctcttgcatcctcctcccaactctagcctgaattcttttcaataaaaaatacaattcaagttgcttctcatggatggcactgcttttctgaggactcaagggccaagatggaggggctgactcagtccagccaacatttaatgagcacctactttatgtatggagctctaacccatgggtccatgggaataaagcagtgaatagtaacaataaataatcgtaacagcaattagagactaatctttattgaagtccggctttctctcttttatttttttattttttgagacagggtttcactctgtcacccaggctggacagcagtggtgcaatctcggctcactgcaccctccgcctcccaggttccagcgattctgtgtgcctcagcctctggagtagctgggattatgggcatgtgccactgtgcacggctaatgtttgtatttttagtagggttttgccagttggctaggctggtctcaaacttctgacctcaagtgatccacccgcctcagcctcccaaagtactggggtgacaggcatgagccaccgcgccatgccaaaatccagccttctcatttgtaaaataacaaatcatagacacagctagtccacagtggcctctgacagtctccagttgttaacggtgaatggtgtccaggtttttggcgtcctgaacaaagaactggacaaaacgcacaaacaaagcaaggaaggaatgaagggatttattgaaaacgaacatacactaaacagtgtgggagcgggcccaagcatatgggttcaaaagccctgttacagaatttttgggagtttaaattccccctagaggattccccttccactggttacttctggtacaccctatgtaaatggagaggatgaagaaaagttacaaagtcatttatggcctaccggagaggatgtttcctgttatagctgaagtgaattggccttatgttccctgcctccctattttcctgccttacagttgctggactgacacattttttattttatttattttgttttgagataaggtcttgctctgtcgcccaggctgaagtgcagtggtgagatcttggcttactgtagccttgaccttttgggctcaagagatcctcccatctc[131 bp omitted]accttgcccttccaaagtgttgggattacgggtgtgaaccaccgcaccaggcctgggctgacactttaaacgtgccattgcaatcagtgtataatggtcccgtggcagagggagaatggtgcccaag[132 bp omitted]gccaacatggtgaaaccttgtctctaataaaaacacaaaaattagctaggggtggcccgcgcctgtaatcccagttacctggaggctgaggcaggagaattgcttgtaccctggaggcggagatagtgccactgcactccagcctgggcagcagagtgagactccgtctctaaaaaaaaaaaagaaaaacttattaaaaaaaaattgcaagcaaaaagcacagaaggcagaaggtgcaaataagcagaggctccatggtctgaaggaggccagtgctgggaccatgaatgaagggggctgggggccaagattcctgtatcctgagggagtccagggtggtactgctccccaagtcccatgggtggggctattggtctctggggatccactgcttgtatttctcctaatctgcttggcattaacctcctgccaggctttcaacacccttggggcagttttcccaggtcctgaggctgggcagctgagtccagtaaaaaacaggggccctggagagggactgtgggcaatgcccccgagtccccggggcctgggaagaacagaggctgccaagtgcagggggtggtggggaggggaagaccctggagtaacaatccctgctgtgtccacttggttcccacggactcaagccaagccaaagcactgcccggaccagttcggcttccaaccaatcctggtgctggcctcagactcctcctttctttctcagaaccccattcccctcagggcccccagagtccaggcccctagattcttcttcccctagaactcaggagtctgggaccccccagtcccttctcctcaggacctagaaggttggatccccagccccctttctcccttagaacctgaaatcacagcccttgatcagtattttgcgccccctagtggagagaagagtgggtctgtcctgtgacttacatacagcaggaatggcagaattttttacttattatgatttttaatttctttagagacagggtctcactctgtcacccaggctggagtgcagtaatgtgatcacagctaattgcaacctcgaacgaactcctgggctccggcatccctcccacctcagcctcagagtagctggaccacaggtggatgccaccacaccacctaattttgttaatttttagtagagctaggatctcgctatgtcaccaaggctggtcttaaactcctaggctcaagcgatccttctgcctcagcctcccagagtgctaggattacaggcatgagccacgaagcctggacggaatggcagaatttatttggtcactccacagagcataggaaggctctgcagggaacctgcctccacaggagccctgtccaaggtcacacttctcatgagaagcttagacctcatcatgctccaacacattggcccttgcagtgtatgagacttggagagcagattgcagcagtttgtatttatagctgagagcgcagttggggttgcagtgaggctggagaaagtttcaaagcccctcacttgcctgggctttccatggtcctctacctaaatttgtacaagtcattttgtactttttttttttcaagacagagtctcccttttcttgcccaggctggagtgcgatggcatgatctcggctcaccacaacctccgcttcccaggttcaagcgattctcctgccttggcctcccaagtagctgggattacaggcatgtaccaccatgcccagctaattttgtacttttagtagagatggggtttctccattttggtcaggctggtctcgaactcccgacctcaggtgatccaccagcctctgcctcccaaagtgctgggattacagtgtgagccaccacacccagccaattttgtactttttaaaagaggccaggccaggcgcggtggctcatgcctgtactcccagcactttgggagaca[134 bp omitted]gagacaggagaatggtgtgaacccaggaggcggagcttgcattgagctgagatcatgccactgcactccagcctgggtgacagagcaagactccatctcaaaaaaaaaaaaaaaaagaggcccacaaaacacataagcttcagaccccacaaagtctctcctcaatccctgtcttagtctattcacttcatccctggacttaaaagactgggcctacacattcaaagaatcgttattaacaccattattgtctgtaacagtgaggatgaggcactgagttttctttttcttttctttcttcttttttggaggtggagtcttgctctgttgcccaggccggaattcagtggcatgatcttggctcactgcaacctctgcctcccgggttcaagcaattctcctgcctc[225 bp omitted]ccctcagagaggtaagtcactcaccttctgcacctagagagcctcatccccagggcaatcatccccagggcagtgctggagatacagcagtgaccacaacagtcccaggtcagcctgcccagttggggagacacacccatccctgacagtgatgacacaaagtgagcagggatggggtggaggagctgagggggcaagggaggataggaaaagggctcagagagagtttcctagagcgagagctactgttacagggctgagacctagaggaaagtggaggaaaccgataataaaatgataattatatattcagaatatcccaatgcaaagcttactctttttccaggtaatatataaggttcataatcacagcgctccaaatattgaccacttaagcatgaggcccagggcctgatgttttccattcgccatctaactacgtcttcccaataacacagcggggcaaaacgggaagacgaagaacgagtacgattatatccctggtttataaaaggggagaaactgaggctcaaacatagatgtcacttgtcaccagcctggccaacacggtgaaactccgtctctacttacaaaaaaaaaaaaaaaatgggaggctgacgcaggagaattgcttgaatccgggaggcagaggttgcagtgagccgagatcgcgccactgcactccagcctgggtgacagagcgagactccgtctcaaaaaaaaaaaaaaaattagccaggagtggtggcgtgctcctgtaatcccagctactcgggaggccgaggatgcagtgagccgaggttgcagtgagccgagatcgcgccattgcactccagcctgggggagagtgaggctccgtctaaaaaagaaaaaaaaagagagagagagacgtcacttgtccaggatatcttatccagtcagtagcaccacaagggttagaaccctggccagacatccacccaatttcacgggtgaacagttaacagcctctgagagtcttgtcctctctgggcctccgtaacaccctctccaaactaagggtctctcagcagatggccgggtttagagctgtacgaagacacacagctaatgaaaaattgtggaattctcagagcccgtgaagcctagcccacggatgcgaggtttggaccactgagggaacgcgcatgcgtgctaggcagggcagtccgaaggcttgggggtgtatcatagggtctcatcggaggtttgttggccgtaagacccctggaattggaactctaaaaacacagaaaggatatgagctcaggagacttgaacgaaagagttgtcttaggaagaggggtcagaagacaagggtgctgggcaaaaggctagttcttcgaatcagaatacggtggccagaaaggttcctctgacgaaagaggggcgtggttcgaagccgtacagtggccggtaaagctcaagaaacatggaacgaaaaggacgcgaagaatcggcagggagaagcggacaggatgtcccgaaaggctcatataaccgaaaaggcgggttaatgtgaagggacggaagggacagaacttgcgggaggcacatgctggccgagaaagtcctggagttcggagcatacagtgtttttattaggtggaaacaaacgggctgggagaaagacgagtacggtggccaggttggtccttccatagccggaagtggccttcctgagaggcgtggctgcggcactcttgccggatagggtggcccggcggggctaggaaagcgtgaaatctcgcgcgattgcgctgcgaagtcggggacggggcggggctggcggcgggggcggggacccggagcgggaagatggcggcggcgcaggaggcggacggggcccgcagcgccgtggtggcggccgggggaggcagctccggtcaggtacggaggccgagaggggactgagggggttcttccccagccggggggcctcccacggggcgtgtcctacctcttgtcacggaatcccgtgcactgggggctccttggccagagggaccttgaatacccggcccaggcagggccggaccgcccgggaggccggacggtgccgggaacagggccctgttgcgggtcggttcccctgcacgctcgagccgggcggccaccaggctcattgctcgatccggggagacagtggctcggaggggcgcaggcttgtaccttggcgcgctgggttctcaactccgcgattccatgctctgaggccgttcctagagtggtctggcgttcaggtctcgttgtagtgtttgaggtgtgcgcagtgattaattgggagttttctagctgtggggaagtcagtattagcagggcacggccgacagacccattttacagacgggaattcaaggaacagtgagactaaggcgcttctagaaggtcatcctggttaggtttgtaactttatgtagaagttacaagacactgctgacacagggactggtatggttgtggttttaatgtaaaatagttctatgggttaattagtcctggtgcggatgacttctgccccactgctgtcttaacacactgcagagcataccatttcaggcagctaccgttcaggcatttggggaatagatggagagacatgaaggtgctgtcgacccacccactgggatgtcactgacatgtgggaggcagctcaggggaaaggagtgcgggttgagaggggagaatgaagctgactctctgtgtgaccttgggcaagttcctttccctctttaggcctttatctctcccgtgttaaatgcagaggttggacaggagggccagccatatccctgctgtcaggggacgaagagaggagactgacatgtaaacagttgtaatcctgaatgattaggttggtgacaaaagtctgtgtcagggactgggggagcccagagaaagagcaagtggtatcacttgggtaggacacatggatgaaatttgtgtgatagagcccactgtatctgctctgaatcttttcagcattctcagccagggcctggcttcagggacagcttaggaaatgtttgttgagttagtgctggaatgaaggctcagttcctgtcttcaagggtttcccagtcttgctgaaaggaggtcgtttcccctctgggtttctgttgattattgggttgatggtggcttgagagaccagggcccaggttgttctcattgccctgagcttccagatggcactctgatcttctcttgtaccaactctgcttaaaaacaatcaagagttacccctttgcctttaggacaaagtacaaattctttaataaatcacagtcttgcacgatccgacacttttcttcagactagactaggatttctcgagctcggcactatcaacattttgaattggataatgctttgtttggggggctgccctgtgcattttaggatgtttagcagcatccgtggcctctacgcactagatgtcagtaggatccacgcccctccccagttgtgacaaccatatatgtctccagacattgccaaatgttccaagagcaggggggcaaagccatccctgcgtgagaacaactgcgctaaaggggatccgctgctctgaacctattttatttctaaacctcttttattgcctctcagtctctttcctcatagtctatgcacaggtctctcccctctttagctagttgatgtgtattagtcctacagatttcagatgtcccttcctgcagaaagccctctttgactgtctgggctccgctgtcccagccctgccctactgggtttcactgtctggggactgggaaccccaggagggcagagccaggactgccttgatcaccactgcttccttagcaccactcagctcagcgccaggcacagaggaggtgctcagtgtttgtggaatgagcggatcttgaaacagaggctgggctgaggtggaattccctgatgccgtggtggatccaggtaatcagtgaagacatgccgcaaaacctagcttcctcctgctcttgcctagccctggtggtctcagctacttcttggaccctttagcagatgttgctggggattgtgtgtgtgcgtggacgtgcagatccgagagcaggaactgtgtcttagtcactgatgtgtccacagccactgccacccttctcccatgcccagggcctagtgcacagcaggcacaccctctgcacagtctgctgctttagctagcctgctcctgtagccaggaactcggacacagaacccacagctttgccattccttccttcagcgaatgcgaattgagtctactccatgctaggcctttgctgatgctggagatacagctgtgaataaaataggtgctgccctcttgaaggcccttacacttatgttctagttggagctgaatttataggggaagcacagacagggacacacagtgaacaagataaataagaaaaacagcagttcagatggctctgcgtgccatggacagaaataaagctgggatggggataggaagtgaggggtgggtagaagagttgcaattaaatagggtagtctagaaggcctctctgaggaggtgacgcttgaacaaagacctgaaggaagtgagagagggagtcccaaagatacacgagggaaaagcttttcaggcaaaggagcagccagtgcgaaggccctaaagtgggaggtgcctggtgtgatgaaggaagggcgaggaggctggagcgggtgaggggagaggggtggctggggacagatgcagattatgccaagctttggaggccatggggaggacttggcctttactctgagggaaataggagctgaaaagagtgactctttttttttttttcttttttctgagacggagtctcgctttctcaccacaatctcggctcactgcaacctccgtctcctgggttcaggcaattcttctacctcagcctctcaagtagctgggattacaagcacctgccaccacacccagctaatttttgtatttttagtagagacagggtttcaccaggttggccaggctggtcttgaactcctgacctcaggtgatctgcccacctcggcctcccaaagtgctgggatttcaggcgtgagccaccacgtccagccttgtggtataatttagatggtataacgttcacctgttcttaggatagagtccattggctcctggtccatttatgcagttgtgtggtgcagccatcaccacagtctggtctgagaaagcttctgtcccctcaaaaagttcccttttacagtctctgctgctcccaatcctaggcagccacagaggtgctatctctgtaattttctaaaaatgtcttaaacaaggatctaaacaacatccagtcttttgtgtccagcttctttcattgggcataatgggtttgaggttcatgttgttacatagatctgcagttgttcatttttattttattttttacaacctaggatcagggaaatttggcctttggggaaatcctaaagtacgtgctcacagttgttccttttcactgctcagtggtagtctgcagacatgacacagtttattctttcagtccttgaaggatatttggattgtttttagtttttgtctgttgccaataatgctgctatgaacattcatgtacaggcttttctgtggctgtattttgtttctttttttttttttctaagtaagagagacagggtctccctgtgttgctcaggctggtctcgaactcctgggctcaatggatcctcctgccttggcctcccaaagtgctaggattataggcatgagccaccacacctggccactgtttgtttttgagacagagtcatgctctgtcgcctaggctggagtgcagtggtgtgatcctggttcactgtagcctcattctccaaggctcaattgatcctcccgtctcagcctcctgagtagctgggaccacaggcatgcactaccacacctggctaatttttgtatttttatagagatgaggtcttgctgtgttgcccaggctggtcttgaactcctgggctcaagcagtcttcctgccttggcctcctgaagttctgggattataggcgtgagccactgcgcctggtctggcttcatgttttctgcctcctgggtagccattcaggatgggtttgctggattgtgtagtaggtgcacatatgacttgttcaataactgccatattttccgaagtagctgtacttttactttcccccctagcagcatacgagggttcctgtttttccacatccctgccagcacttgtgattgtctttctgctgatagccatcctaataggtgtgaagtgacacctcattgtggttttaacttgcctttccgtgggaaggttcccagccagattgcccatcactaacgggtaagcgaagagacctgggagtcagtcagatgcagcttcaaatcctgacctggcatcaagtgtcctttcctgaccccaaatcagctcagacccattgaaacccatacttggacccctaaatttcccaatagctaggctggccttgaggagggggccttgtgcctgtctgatttcccttccccagccgacccccgccccatagatctcctcatcagaatgtggctttctctgtctcagcctaagggtctcacccagacgacccagacgtcaaagggagctcctcagggaggcctctctgaccacccactccaaagtggatccctgttcccaactcagttgctgtcacttccccctgcttgttttccatgtaccatttttaattatcctgtttaccgttctagtgtgtttccttctagatccccagctctgggtaagcagggcccagatttctgtctaaaatgttccagtattttcacaacctggtccacaggtcagagaggtgaagtgatgtgcccaaggtgtcacagccaagaacggtgggaccaggactatagctgaggtctgtttgaccctggagcccctccaatggtgtcctgtgctttgggagattacaggaaagagctcttgctggtgaaggggacaggaggtgacaagtgacacatttaacacatgtagcccctctaaccatgctcctgggacatttgctatctggtgggtaaggtgaatggagaaaacattgcagaggagtggactaggggctgtggaggagagggccagacactggagcctcagagggaagtgggtttgggtgacctgagcgtccggggtgagtccttcaggcagcggtggccacacaggtgtttatcacagccttgctctgtgccactggtgctcttgagctaactgtgactgtgatagccctggtcctgcctcttgaaggctgatggctgaggggacagctgggaggaggggtgaatgagaacaggactggggagctagcagggtgcgtgaagggtgagcagaacatccccttccaaacctggcattcagagagtctctgattgtgaccttctgtgtctgagtgaagagtcctcctctgggaagccgtgcctggctcccttgcctgccccccttcccttctgtcattctgcttctgcggtccttcctgagtgaccagacaagtggcttcacctctctgagcctccctttgctcagcagccggatggagctggtcatagttttggcctcaggattagtgtgctgtgtgctgtcacagacatgtcttgtggccgtggcttatggtagcagctgatagtctggttgtgtttttctgtgtctgtcccacctgctggaccaggggcccttggagggcagggttggccacagagggggcctcaggaatggtttgcccagggaaggctctttcagctaagccccagccttgaagaatctggcacctgccataagactccttctgttgttgtccccaatagccacctccttgcatcctggctccagccccagggaacagtggacagtcatcagaatcagactgtgcctctaatcttctgtttctgcacctgctgcttctctcacttcctcctttgtgccaccaacttgctatgttttaggtctcagcttcaatgcccccttctccaggaagttgccccgaaccctagactggaccaggtgcctctcagggctcctgcattcctgccccgttctggacagtcactgtctagagatgaatctttctcccccaccgggctgttaaaccccaggaggacagcaaaagactctctaggtcaccactgtccctaggtcacagaggtgctctgcgagtgttttcctcctaaaagaagaggaccgcaccttcccaggtgttttcactgattcattctccagttattgataagcacccactctttgcccagcctgtgcctggccttcatgcatgatggtgtctaagacagcccccgtgtccattctccctccttaccctggcctctgtcccccacaggtgaccagcaatggcagcatcgggagggacccgccagcggagacccagcctcagaacccaccggcccagccggcacccaatgcctggcaggtcatcaaaggtgtgctgtttaggtgagcagacgggacttgggtttgttcaccgaaaacattcaaataaaaataaggaagaaaggaaaagtcagctgatcagctgaggatggtgatcattactgtatggtagagttgctttttttctttttttttttgtatgatggaatgttttctaaaccttttttttactctggtaaaacatactgaagtagggagtctccctgaacctgttctggtttttggggggctacctgatttgtgaaaaaataaaaacacaaaaaatactgaagtagtttgctagggcccttgtatcaagtaatatagacggagtagcttaaacaactgaaataggaaattcattgtcttacagttctgaaggctggaagtccaggatccagctgtgggcaggggcagtttcttctgtggcttctctcctgggcttgcagaaggccgtcttctccctgtgtcttcatgtggtctttcctctgtgtgtgtctgtgtcctaagctcctcttatggggacactagtcatactggcttagtacccaccataatgacctcactgaaccttacttttttacagaccctatctgggccaggcacaatgactcaccctcataatcccagcattttgggaggccaggttggaaggactgcttgagcccaggagtttgagaccagcctgggcaacatagtaagaccctg[145 bp omitted]aataaaaaaattccggaggctgagacaggagaatggcgtgaacccgggaggcggagcttgcagagagctgagatcgcgctactgcactccagcctgggcaacagagaaagactccgtctcaaaaaaaataaaaaatacaaaaaaaatacaaaaattagctgggtgtggtggcacgtgcctgtagtcccagctactcaggaggctgagggcaggagaatcgtttgaacccaggaggcagaggttgcggtgagctgagatcgtgccactgcattccagcctggggacagagtgagactccatctcaaaaaaaaaaaaaaaaaaaaagccaggtatggtgacacgtacctgtagtctcagctattcaagaggctgaggtaggaggatcacttgagcct[137 bp omitted]tgcctcagcctcccgagtagctgggactacaggcacccgccaccacacctggctaattttttgtattttcagtagagatggggtttcaccgtgttagccaggatggtctctatctcctgacctcatgatccgcctgccttggcctcccaaagtgctgcgattacaggtgtgagccaccgcacccagcctatttttatttttgtaatggagtctcgctctgtttcccaggctggagtacagtggcgcgatctcagctcactgcaacctccacctcctgggttcaagcgattctcctgcctcagcctcctgagcagctggaattaaggtatgtgccaccatgcccagctaattttgtatttttagtagagatggggtttctccatgttggtcaggctggtctcgaactcccaacctcaggcaatctgcccgccttggcctcccaaagtgttgggattacaggcgtgagccactgcacccagtgcctagctaatttttgcttttttttttttttattagagatggggtttcacta[136 bp omitted]accactgtactccagtctgggcatcagagtgagaccttatcgcaaaaaaaagttggggggaccctgtctctaaatctagtcacggtggtactgaaggttgagactttaacatatgaattttgggagacatgattcagcccacatctgca[132 bp omitted]ctgcagtctctgcctcctgggttcaagcgattctcctgcctcagccacctgagtagctgggactacaggcacctgccaccacgcctggctaatttttgtatttttagtggagatggggttttgccgtgttggccaggctggtctctaactcctgacctcaggtgatccacccgcctcagcctcctaaagtcctgggattataggcgtgagccaccacgcttggcccattttaaccatttttaagtatgtagtcctgtggcattaagtacatctccactgttgtgcccccatcaccattatccatcccgagaatttactcttcccaaactgaaattccatacccatcagacacaagcttcccatttcttcctccttgcaacacctggcagccacttttctatttcctgtctctctttcactactctagttagctcctgtatgtggaatcagacagcatttgtccttctgtgactgcctggtggtgacccttttacctgtgggttcacatgctattcctgggcagtgggaccccagggcctgttttttcaaagcccagcttctgtttgaggccctggggagatgctgggtggtggcgggggaatatgcttggcactgggttctatccttcctgcctagacctagtgacagtcaccttctttgctctgagcctttgtttactcctctgcaaaatagatattccttttattttttttttgctttttggagatgtattttagcaaaataagagaccacaccatgcagttaggcaatcagcttccctacttatgagatagaaggaattgcacagcagagatgtttacaacaatcatcccgccaggtgcggtggctcacgcctgcaatcccagcactttgggagaccgaggcaggcagatcatgaggtcaagagatcgagaccatcctggccaatatggtgaaaccccatctctactaaaaatacaaaaattagctgggtgtggtggcacaagcctgtagtcccagctactcgggaggctgaggcaggagaatcacttgaacctgggaggtagaggttgcagtgagccaagatcgtgccactgcactcaagcctggcgacagagcaagact[187 bp omitted]ggtggcgggcgcctgtagtcccagctactcaggaggctgaggcaagagaatggtgtgaacccaggaggcggagcttacagtgagcccaggtggtgccactgcactccagcctaggcgacagcgagactccgtctcaaaaaataaaacaaaaataaaaaaataaaacaatcattcctttggctagaatgtcttcacatggccatggccagctgcacgggaggctgggaaatgtggtctttaatctgggaaactgagcaccctgctggaaagcagggctcctattactgaggaagaagaggagagtggttatggggggcagctacttatctcttccataaaatcttattactggtttcccttagcttataaattatgagtgtttattttacaaaattaagtagttcaaacaat[144 bp omitted]aaactgcatctctactaaaaatataaaaaattagccgggcatggtggcaggcgcctatagtcccagctactcgggaggctgaggcaggaggatggcgtgaacctaggaggcggagcttgcagtgtgccaagatgccgccactgcactccagcctgggtgacagagcgagacacagtctcaaaaataaaaaagtgtaatgtgttggtggccatcccataggcacacatttttgtaattggccctaaatgggattatatatagatgctcacagatagagttgtttaaaatagagaaaagttaggaggcggggggcaggtagtgtcagatagcgtgtaagagcacagccctgctgacatctcagccctgccacctctgagctctgtggcctggtcaggttatcacccttcttgagcctcattttccacctcacagacagggaatcttgacaattagctcagggtgcatcagaaggattccaagagaattcatgtcaactgaggggtgcaggagctggcacgcacacagacaatgttggccatgattccttttgttgttcaacgtggaaaaaaaaaaagcctgagcaacacagtaagacc[132 bp omitted]gcctcccgagtagctgggactacaggcgcccgccacagcgcccggctaattttttgtatttttagtagagacagggtttcatcgtg[137 bp omitted]atggcgcacacctgtagtgccagctattagggaggccgaagagggaggatcgcttgagcccaggaggtcaaggctgcaatgggccgtgatgatactactgcactccagcctaggcaacagagtgagactgtatctcaaacaaacaaaaaccttag[134 bp omitted]aacatggagaaacccatctctgcaaaaaatacaaaattagccgggcatggcggcttatgcctgtaatcccagctattcaggaggctgaggcaggagaatcgcttgaacccgggaggcggaggttgcagtgagccgagatcatgccattttactccagcctgggcaacaagagtgaaactctgtcccaaaaaaaaaaaaaaacaactcatgatccctgatgtagtcactgatcacattctagactagagcagaactgcctgcctggtgtcctccaagagtgtcacacaggacactgagaaactgcaggaaagaaacctccccactctgttaagttgcaaaactgacatgtgtgcctcaaaaattcctgccatgtgccctacgcttctcagtcatgcgcccctgtcccttaccgtctccacttcacctcccctccccatggccacgtaaagacttcagattttcttatatatcaccttcttttttttcatgctgcaagcagctctgcatgaaaattatttttatctttcccttcatttttacataagaggtagcctgttttacacactgttctgctccttgatttttttcattaacaatatatctttgaaatctttccacgtcagtgcatagggagcttccttcagagagacatttttaatacaagtcacactgtaggctaatttcctttcttagaactaggcagcatcaaacatcagttcgggtgggtgctcggagaccatcttggctgcagttcttaaaatgggatccagggtttgttttcaggggcccatgaactccttgtagcttgaagctgattatgtgggaatagcctttctagatagcgggtggcgtctgtgtttttgagcacatgtggttacctggagtgggaggtggagcaggaactgggtatataaaggaatggggtgggagggagagttttgattatacgtcttttcatatatttaaaaatgttctgaacctgtgactgtagaatacctatttgggtgggagaaaggatttaatgtctgttttctttgcttactcaagtacatcaggaagcattagaaaggtccagtctcctgcaggcctgggtgcatggatgaggggccatggccatgagccctctgagagggtccacagaactgtgggcgtgtggatacacacaggacgttcttcaggggactggggatctggaatccaaaaaggcctggccttgttttatacatggggatctagaagcccagaggggttaggacccccacagccacacactaagccaggggcagagctgcctgggggcatcactgcttctacactctcccctggtgtgtttactaaaatgagagcctctgctggaggcatcggtatccccagagattgccaggtccagaccttccccagacgtgcatatcagggacttcatggggaggtagcgatggctcagctggaccgtggcccctaagaccctggaccccagggccttgtggcttctacaggcagaggcaagttcctgtgcctgatcctgcccctgatcagggctcagcagggaggcaccccacccacactagaatttactcatagtgtttttctgctccaaagttttttgtatgcctttttcctatgattaaaataacagtaatagctaacacttctcagtcacttactgggtatgcaccaggctccattctgaggtacgtgtgcgtgtgtcagatgtatatacacgctatataaacatatatataatttaatgtgtttaatgcttataaactaccctatgagagtaggcactgttattatccccatttcaaccattgaagttgaccactgaggtcacagtaagtagcagagctgggcttcagatgaagatactgtagtttagaggctgggctcataacctcttctgctgtatggttatcatacctataattaataagtacttgaatcatttaatcacatggctgcatgcagctgagaaacctccattaacacagtacaggttcatttctctctgatataccagtctggatggaggcagactaggattctgcagtcttcagtgacccagactccttgctgtttgttgtgccattgctaggtttttccctttatcctcatagcccaagacagctgctgaagattcagccatcacatccacactccaggcaacaggagagaagaataaatcaagaaggaatatttcttctctttaaggacacttttttttttttttttttgagatggagtcttactctgtcacccagactggagtccagtggcatgatctcggctcactgcgacctccacctcccaggttcaagcgattcttttgcctccgcctaccaagtagctgggattacaggcgcccgccaccacgcccggctaatttttgtatttttagtagagatggggtttcaccatgttggccaggttggtctcgaactcctgacctcaagtgttggcttcccaaagtgctgggattataggtgtaagccaccacgcccagcctcgttttggttttggtatctgttgttgctgctgattctcgctcataatgtcgtttccttttgtgcctggcttatctctgtctgtgtcctagtcattatacttgaaaagttatttgtaggaatttcagggctaggatgagcatattttcctacagagaggattgcctttgcttctgcctgggggcattaccaagtcctaggtttccttgcaccaggttcagggcttgagctgcccttcgtgactccttatcccacgagtggccttgcatacttcgccctgcatacctgttgtgcaactcctgggaatgggtaggccacctggttccttccttctcaggggtggaggcttgcaccttgtggggtcttagtttcctatagggtaggtctctggttacctcatatgttgtatgtgccctgggctagcatttttttttttttttttgagacagggtctcactctgttgcccaggctggagtgcagtggcatgatcgtggttcactgcagcctcgacctcctgggctcaggtgattctcccacctcagcctcctgagtagctgggaatataggcatggtgcgtgctgccatgcctggctaatttttgtattttttgtagaaactgtgtgttgcccaggctggtctcaaactcctgggctcaagcaatccacctacctcagcctcccagcgtgctggggttacaggtgtgagccaccgcgcccagcctaggccagcatttttgtcacccaccaaaacacctagcagatgtcctcggacacatgaagaagcttatagggctcctttacttattctttttttttttttcccctagacctgcaaatccaagatcctttacttctttttttttttttccttgagatggactttttgctcttgttgcccaggctggagtgccatggcacgatctcggttcactgcaacctccttctcctgggttcaagcgattctcctgccccagcttcccgaatagctgggattacaggcatgcaccaccactcctggctaatttttgtatttttagtagagatggggtttca[132 bp omitted]cccttcagtttttgcctgaaggtttggtaacctacagtcgtgtccattcttcagagctgtctatttatatatattcatatgtaaacttgataaaaattacatgcatgagaacaaatacgagaatacgtgagcagcatatattctcattctatcaatatgtataattacaaatataaaatatattgatattttcttagtgtattaattttatcaagcttttccaattttttccagtgagagggttggtctgaataattaagcccactgttactaaaattggaactaacgtatcacttactatctgcttctccaaaaattctccaaaagttcagaaatgttgctctttctaagcttctgtgccttcggttcttttccttttcttttttaaaaaatttaattaattaattgattaatttttttgggacaagctctctatctcccaggctggagtgcagtggcgcaatcacgtctcactgcagccttgaccgtcagggctcaagtgactctctcacctcagtcccccaagtagctgggactacaggcatgggccaccatgcccagctaatttttatattttttgtagagacgggatttcatcatgttgcccaggctggtctcaaacttttgagctcaagcaatccgcctgcctcagcttcccaaagtgctgggattacaagcatgagctgctacacctgacccaattatacttttttttttttttttttttttgagatggagtctcactctgttgcaaggctggagggcagtggcgcaatctcggctcactgcaacctacgcctcccgggttcaagtgattctcctgcctcagcctcccaagtagatgggactagaggcacgcaccaccaggcccagttaatttttgtatttttagtagagacagggtttcaccatgttggccacgatgatctcgatttcttgacctcgtgatttgcccacttcagcctcccaaagttacaggcatgagccactgtgcctggcctctatacttcttaagttattttaaaatgtgtaattaaattactattgactagagttgccgtgttttgctaccaaatactagatctcattcattctttttttttttgagatggagtctcgctctgttgcccaggctggagtgcagtggcgcgatcttggctcactgcaacctctgcctcctgggttcacaccattctcctgcctcagcctccggagtagctgggactacaggcgcccgccaccatgcccagctaatttttttgtattttttagtagagacagggtttcaccatgttagccaggatggtctcaatctcctgacctcgtgatccgcccgccttggcctcccaaagtgctgggattacaggcatgagccgccgcgcccgtcctcgttcattctattttttgtagccattaaccatccccggttctgtgcttttgaagcgctaggattccagattctttcttttaaaaattttatgtttattattttttctttatttcttttttcttttaattcatccatctgcacactgaaggggttccagattcttagtctcctctcgggggatcccagggggctggatggcaggtttcccagtctgagtcaagagtcagcccctgcagccctgtggtcaccaggagctcctgcaggatttagagtcaagggtctgcatgcagaccagggcagtgccagctacccccacacactggcaaacggtggcatctgggctccctccccagatgtggtctttagggacatcttatctccttgccagccctgtgactaccttctcagggcctccctgacttggtcactagccccaggtcaggcgccagcatgtgctaagtcagaaggaagtcaggcgggtctatggcggagagccaaggcttggggactcaccaccttgctgcttctctcctcaggatcttcatcatctgggccatcagcagttggttccgccgagggccggcccctcaggaccaggcgggccccggaggagctccacgcgtcgccagccgcaacctgttccccaaagacactttaatggtaactgccgggtggtagggcagacttgggaggtgatggggtgtggaggggtggaatgtggaggagtgatgtcagcagtcgggacagaccaggtccttgctcactggcaggtctaggaaaacaggtccagggttgaggaactctgggcccatccccaacacgtgagacctctgtcacctgggtccatccccagcacataaaacctgtgtcacccaaaagaaaaagcaaattcatttggttaaaataggttaaatcagggtctttggatgttatatttcaaaagtatgttcagcctttcagggttgcagagggagatgtgcaagggagagagtgtgagaggtggggagggcagggagccagcagaggctgacaggaggtgggcccggaaggagaggagacctgcacttccacagtgggcttgggcacaggcagggcagggcttcaggagcctccagagcaaaagcatttagatctgtcagtctaggcttttctgagcaaacatggccattggggcttgagaaaggaggaagttcttgttgggtcacagtgggttttttttttttttttttttgagatggagtctcactctgtcgcccaggctagagtgcagtggcataatcttagctcactgcaacctctgcctcccgggctccagtgatcctcctgcctcagcctcacgactagctgggattacaggcatgtgccaccacgtccagctaattttttgtatttttagtagagatggggttttacctttttggtacgctggtctcgaactcctgacctcaagtggtctacccgccttggcctcccaacgtgctgggatcacaggcatgagccaccgtgcccggtggctcacagtgcttttgtagctctggactgcttcgtccataagcctgcagagctctgaccaggaaggcccagcagccatgagggcaggagatcattcagggagctcctgccccttcctacccctaaattctaattggcaggctggccagtctccaagtgttctttgttcgttgacttcacaggctcagaccaggacaaacatggtggtatgagaaaagagaaaatatgtcctctctgctgctcttcctctctcctctcccctgtcctccataattactgttcccctgagtgtgctgaccgctgccatagctctttagccagcctgcagaggctctgaagagcaggcctgagctctgttcccttcctgtcccaacagaacctgcatgtgtacatctcagagcacgagcactttacagacttcaacgccacgtcggcactcttctgggaacagcacgatcttgtgtatggcgactggactagcggcgagaactcagacggctgctacgagcactttgctgagctcgatatcccacaggtgggggcagctctcggtttctggccccatggctgcttgactggcactgaaggaccttttcctccagtccgctccttgctgagagcatgtggagtttgggctccaggcttggcccttccctgggctcacatggtctgtgaccacaagccagtccctgagatctctgggcttcactttcccctacctgaaaaaggtagataggggtggaattggcctgggaccctcccagctacctctaaggttgtgcagtcctccactttaaactggtgaaagattagtaattgtccttggggatgtttgcctatcaccagtttatcaggcagccccgtttcaaaataatattagttaatgttgattgagctaagtgcagggtactaagctaggctgactcatggaaatttcccggcaaccctgtgaagcaggaactgttattattctcatttaacatgtgaggaaactgagagagaaggaaagtgatttacccaaggccacatcgcatgagagattcagactcaggctctacggctgtggactctcgcagccctaggctcaaatccaacctcctccaggaagccctccctgactcacagagcactcaggcttggttaagcaccctctctgggttctcacacctgctgggcttccccatcccagcccattctggggcctcattgggactcctgtatgggactgtgagccttgtgataataaggctggggctgcctagatcacttccatgtccccagcactgcccaacgtggggctgggtgcagaatcagcaagtattgaacaagtaaaagggacatctctctttggggccttcttcggctgagtccaagacagctgccctcattcctttctccccagcaggccttctcagctttggggtggagggcacatttctgttctatttctgtctgggtagctagaagcagaatgtggacacagtcattctggtttttttttttgttttttgtttttttttgagacagcgtctcgctctgtcacccagtctggagggcagtggcgcaaccttggctcactgcaacttcacctcccaggttcaagcgattctcatgtgccagcctcctgagtagctgggactaaggcacacatgatcacacccagctaatttttttattttttagtagagacaaggtttcactatgttggccaggttggccttgaactcctgacctcaagtgatccacctaccttggtctcccaaagtgctgggattacaggcgtgagacaccgcgtccagccatcattcttttctttttgagatggggtcttgctctgttgcctaggctgaagtgcagtggtgcaattacagctcactgcagcctcaacctcctgggctcaagcaatcttttcacctcagcctcccaagtagctgggacaacaggcatgcaccaccatgcccagctaattttttgtagagatggggtctcaacatgtttcccaggctggtctcaaactcctctgctcaagcgatcctctcacctcagcctctcaaagtgctggaattacaggcatgaaccaccccacctggctggactttctgacctgcactgagaggtgactcccacagagacctcaagcccagcccccaggccttgccacgagatccaaggaaggaccagggcctggcaggcccagcagggggatctgcttccaagggcttggatctaagtcgaagcttcagggtggggtccaagtggacttaaaaggcaggagagctgggcacagtggcatgtgcctgtaggcacagctactcaggaggctgaggtgggagaatggccagagcccaggagtttaagactgtagtgtgccatgatcgcaactgcaaatagccagtgcactccagcctgggcaacacaggaagaccccatctctaaaaaagatagggagagtgaggagaacacaatgtggccaactgaattcgagctctgcacaaggatcagagaggttcagtgctcgcctttgtctccacccagtgcccctggacaacttgcctcccttcttgaagcctcagtttcctcatctggatcaagtgagaatagtcccccttccctgggaggcaaggagacttgatgagataatgaggaagacttgggcagagaggggccagctggaggtagcagggagtagcacccaggagcccacagactgggtttccatctgcgtacttgccacacactatgtgaccccttggcatgagccccgtttgcctcatctgcaaaatggggtggtaacatgacccattgcataaggttgacatgttatatgtgtgttaactcgttagattaggaagctgttgtctgaagtgcccagggcagggtctggcccatagtaggagctccatgtcggtcagctgcttcttcctgttgagtgagcttaacgagagctcgttgactgagctgtgtgccagtgctccaggtagtccctgcagtggtgccctcgggtcagtgctgtgggaacttcgcatcctctaggtggggccctgaggctcagagagaagctgagctcacacggccatggcaggtagagcgggcgtctgagtctgtctgactccagcatttacctctctgccacccagctacatgccccaccctgagtactcagtaaatggccagagagttgagggggaggaaactgctgcagatgggtgccaggcagggctttaacgtttccctcaccccagttgcccagcctgcccacctgaccttccgtcttttgcagagcgtccagcagaacggctccatctacatccacgtttacttcaccaagagtggcttccacccagacccccggcagaaggccctgtaccgccggcttgccacagtccacatgtcccggagtaagtcgctcccctgcagccaggacccactgtccaggaggccagcatcctgggagcccccaggctaatgtggcggacaaatcccaagtccaggagggcaggcaggaagcctgtgctcaaagagggtgggattggcagggcaggctcaagccccacccagcctgaaagagccctgtggacactaagcagggatacccacggaggaagggagacccacggaggctcagggaccagagagaaattggccagaaaaagcagctggagacagggactcttggagaggaggagacgtccttcaccaagggggaagggccagggttgacttttgcacagtaggggcctgatagaagtagacactcaaaaataatttgtgggctgggtgcagtggttcatgcctgtaatcctagcactttgggagacaaggtgggcagattgcttgagcccaggagtttgagaccagcctgggaaacatgacaaaaccctgtctctaccaaaaaagacacaaaaactagctgggcgtgtgcctgtagtcccagctgctcaggaggctgaggtgggaggatcgcttgagcccaggaggtggaggttgcagtgagccagaatcacaccactgcactccagcctgggtgacagaccgagaacctgtctcaaaaagatagatagaggccgggcacagtggctcacgcctgtaatcccaggactttgggaggcc[133 bp omitted]gaggcaggagaatcgcttgaatccaggaggcggaggttgcattgagctgagatcacgccattgcactccagcctggtgacacagcaagactccgtctccgtctcaaaaaaaaaaaaaatagataaaattcaaagaacagtgtgggcaacataatgagacttcgttgctacaaaaattaatagccaggtatggtggtgagcacctgtggttccagctacatgggaggctgaggtgggaggatcgcttgaacctgggaggtcaaggatgcagtgagctgtgattgcactacagctttccagcctgggcgacagagcaagtccacgtctctgaaaaaacaatagtaataaaaaataagactaccacttctactcccatgataactcattaatccattaaaccactaatccatgaatgggttaatcagttcctgaggggagggtcctcatgacccagtcacctcttaaaagcctcatctctcagtactggcacattggggattaagtttcactgggagtggggagtactagagtacatcagtagtcccagctacttgggaggctgaggtgggagaatcagcatgagttttggccaggacaaacattcaaaccatagcattgtccgtcctcttgttttcgagaagttaataattgttgtcatctttctgcttgcctggctctttttttttttttttttgagacagggtctcactatgtcgcccaggctggagtgcagtggactatctcagctcaccacaatttccacctcccaagttcaagcgattctcccaccttagcctccaaaatagctgggactacaggcacacgccactacgcccggctagtttttgtatttttagtagagacggggttt[132 bp omitted]gagtcctctgtctcctgatgggcagccgtagaaatctcttgctgtacctgtttgagcggagctggagaatggcttcctcagaaagccccccattcttctaacgggagttctgtgtactccacctagctttcactttattgaggactattccagacattccctgtggatttggttaagatccatctggctggttttgggtggcgcagcaacagacagaattctatttgtatgagttaggtcttacctacttcttttagtacaaaaatatcctaaaggatggtaatttttttttatcacctatactggatgaaatgaaaagttgactctatgtgggtccctagaaatgacttggaaaggtcttctggagttacttgagcccctttctgagtgagtgtgtctgaagaatgtgctgcgttggtatgtcccacccggctgacgtccatgtggtgagatctttggagaaccaggcagaagtggcttgagggggtgtgacctacagggttggtctcacagatgtttccctgcagggggatacgtcaggggtctgggctaaaatgcccgatgtttcagaggtcgctctgaaggtgacccaggtgggtggctcttcaccctattcttgtaccccgtttgacgatcacctaatcatcccgttgacccaaatcgatgccagtattttctgcagttttgtctttggtgagtgtgatccatgtcactgtgtggtgaggtttattcacagtcagtctggtctgtaaaatagaacctgcagacagtgaacctgaaaagcatactaggatcatccaggcctccctccccagccttggagctgggaccctcaaagcagggacatagaaggacttggagtgagccacccacaaactccagggtgaaggagagtgtgagttcagaaaagcccccttttggctggttgtggtggctcatgcctggaaacccagcactttgggaagccaaggcaagcagatcacttgaggtcaggacttcgagaccagcctggccaacatggtgaaaccctgtctctactaaaaatacaaaacttagctgggcatggtggcacatgcctgtaatcccagttactcgggaagctgaggtgggagaatcttttggaccccggaggcggagattgcagtgagccgagatcgtgccactgtactctagcctgggcgacagagcaagactccatctcaaaaaaaaaaaaaaaaaaagaaaagaaaagccccttttatccccaagaggccaataatcagtattctagagcagctccgtcccatggagataggatgtgagccagagaaggcattaaaatttttccaatagaaaaatactaaagagtaaaaaggtaaagagaggccaggcacggtggctcatgcctgtagtcccagcactttgggaggccaaagtcagaggatcgcttgagcccaggagtttgaggccagccctggcaacatagggagacctcatctctacaaaaaaaaattttattttattttatttattttatttcattttatttatttattattatttttttttg[135 bp omitted]cacgcccggctaatggtttttttgtatttttagtagagaccaggtttcaccgtgttagccaggatggtcttgatctcctgacctcgtgatccacccgccttggcctcccaaagcactgggattacaggcatgagccagcgcgcctggcctattttattttatttttttttgagacagagtttcactcttgttgcccaggctggagtacagtggcatgatcttggctcgccacagcctccacctcccaggttcaagcaattctgcctcagcctcccaagtagctgggattacagtcatgtgtcaccacgcccagctaattttgtatttatagtagagatagggtttctccatgttggtcaggctggtctcgaactcccgacctcaggggacccacctgccttggcctcccaaagtgttgggattacaggcgtgagccaaaaaatttttttaaattagccagatatggtggtgcgcaacctgtagtgtcctccgactcaggaggctcaggtagaaggatcatttgagtccaggaggtcaaggctgcagtgaactgtgatcaggccactgcacttcagcctgagcaacaaagcgagaccctgtctcaaaaagaaatataaataaaataataaaaaggtaaggccagggccgtgatggctcacacctgtaatcccagcactttgggaggccaaggctagaggattgcttgagcctaggagttcgagaccagcctgggcaacatggcaaaaccccccctaataaaaatacaaaaattagccaggcatggtggcacatgcctgtaatcccagctactcgggagcctgaggtaggaggatcacccaagcccaggaggttgaggctgcagtgatcacaccactgcactctagcctggataacaaaaggagaccctgtctcacaaataaataaataaaaaggtaaagaaaaaccatgagattaatatcaataatagtttaattgagctcaacatattctcgtttcaacatatgatcagtataaaaagtgagatattttacatttttgtttccccttgtgtcagttttcagaatctagtgtgtgtgactgggcacggtggctcacatctgtaatcccagcactttgggaggttgaggcaggtggatcacttgaggccaggagtttgagaccagcctggccaacataatgaaaccccagctatactaaaaatacaaaaattaggcgggcatggtggctaacgcttgtaattccgtctactcgggaggctgaggcaggagaatcacttgaacccagaaggcagaggttgcagtgagctgaaatcgtgccactgcactctagtctgggcgacagagcgagactatgtcaaaaaaaaaaaaaagggtctagcgtgtgttttatatcatagcacttcttggtttggaccagccatatttgcagtgcccagtagctgcatgtggccagcaaccctgatactggatggtgcagctctagaagattttcctccaagaaaggggggctttttcctccccacaggagccaggtccatctggtctggatgcctccaagctgcagaatgtgttctttgcctgagccaaagcctctctcccctgtgcctccccctccaccagccagcgctgccctctggggctctcccttccctggacagtctctgtcaggtgtggacacgattggggcatgtccccctggaattttctccaagtcaacccttgagtgttggtttctccccctggacacaggaggaagatccccaatgatttaataatcatagaaatgatgaggattggccaggtggctcaagcctgtagtcccagcaatttgagaggccgaggcaggtggatcacttgaggttagaatttgagaccagcctggccaacatggttaaactccg[132 bp omitted]gctctctagcctgggcaacagagtgagactccatctcaaaaaaaaaaaaaaaatgaggatgacgtttctgctaataagcagtaggccctgggccaagaagtggtgaggcttttcttccttctttagggaagtgacatcactcaccagcatcccttagcttgtaggattcagagccaagattgcccccagagcccccgctgttggccaggtctctttcccctttccctgtctctccctggccccaggggacaggatagagacttgagggagggcagactgagttttccttcatagcataaggaagagctgaaaagtccccgggctcagtggctcacgcctgtcatcccagcactttgggagactgaggtgggcagatcacgaggccaggagattgagaccagcctgggcaacatggtgacaccctgtctctactaaaaatacaaaattagccgggcgtggtggtacacgcctgtagtcccagctacccaggaggctgaggtgggagaatagctggaacctggga[146 bp omitted]cagctcacacctgtaatcccagcactttgggaggccaaggtgggcagatcacgagatcaggagattgagacaatcctggctaacacagtgaaaccctgtctttactaaaaatacaaaaaattagcagagcctggtggcacacgcctgtaatcccagctacttgagaggctgaggcaggagaattgcttgaacccaggaggcggaggttgcagtgagccgagattgtgccactgcactccagcctgggtgacagagcgagactctgtctccagaaaaaaaacagaaacgtccccaggccagggcagaggttgggagatggagcgtgggcacgcacaagccccttcctccccggcagcatttgggacaacatggcagggggcctgtggccaactgggcctctgcgagaggaagtgaggccaactcctggctggggattcacagcctcaaagtgtttctcatcttggtttctcatgttggtggcttcaggccttttttggaaccgtctgctgcctctttatagtcatgtattcaactggtcatcaccgagcctgtgcaggcgccccatgtgtattcaaacaggccctgcccctacccgcatttccgcacagagtttgcagactggttgcagggacagacagcaggcaggtaaaccactggctaagtggttttggatagtggtgaaatgttgtgaaggaaacaagctggcaggagaatgactgcataggctcattcagtggggtggccagggaagccctgtggaagaaggacattctgccagggacttgaatgccacggaggagccaggccacgaagattgtgtcagggcatgggttcctgggacacggggcagcacgcctgaaggccccgggttggcatgtttgagaagtggaaggtggtgagggttgagaggtcaccggggctacggtgagtgtctggggttccaaagctgcgggatgccatgatcagtcacttgtttttatttatttgtttgtttgttttctttttctttttgaaacggagtttcgctcttgttgcccaggctggagtgcaacagtgcgatctcagcttcctgtaacctccacctccctagttcaagcgattctcctgcctcagccttccgagtagctgggattacaggcacccgccaccacatccggctgatttttgtatttttattagagacggggggtttcaccatgctggccaggctggtctctaactcctgacctcaggggatctgcccgccccagcctcccaaagtgctgggattacagtgccctactgagctggggtttctgcctggggcatttggtgatggtggcgtccccatgatcatgaggaactgggattcgttgagatttggggaggcagttctggcattccaggtcacattgatctcagcaggtgagtgcaaggtggatgccaggagaccgtgagccgttgctggtgggcaggggtccgggctctggaggctgcaggtgccagcaggtctcacgtcccctcctttcccacctcccaaccacagtgatcaacaaatacaagcgcagacgatttcagaaaaccaagaacctgctgacaggagagacagaagcggacccagaaatgatcaaggtaaatgggcagggttgtcagggcctatagggaccaagccaggccattcacagctcatcccagaccactggggctgtcatctgtcaccaccactgaaccaccatgccggctcggtcatgccacctcccctccctgagcactgggctcctcctctgggaaatggggtcaggaggcagctgtctctcagggagtgaggaggatcccagacaaggttacctgagcctcttgccagcctgggaggggtctacatcacagtcccattgtcacatgaggacacttgctcagtctcagccggaagtggcaggccagggactctcacccacacagccaggccccagagcccaagctcagcctggctccaagcacacacacgagaatatggctttagtaggaactgcaggattcatagttgctgtcactcccagtgggctggggagccgggcagttaatctgtggttaacctgcagtgggcactaagagacttcctctctctgcgggtggtcctgtgttgggggggtggtccctgctcatggagctgaggccaccgtgcaagagtgtgtggagcctgctgtcatgaggctgggcttcgcagcctggcctaggatgccagccctgcctctacctctacctcggttttctacatgtggggtgggaggatcctgtcggtggccggaagggtcctgggtggcggaatctctaagcctagggaggagagccttctgccagcagttgctgtggtggctgatattctgctgccagggttgtcaggggagatggctcatgcctgttttcccagcattttgggaggccgaagcagaaggatcacttgagcccggaagttcaagatcagcccaggcagcatagtgagaccccatctcttccaaaaaagagaaaaaagaaagaaagaaaagaagctgtccatggtggctcacgcctctaatcccagcactttgggaggccgaggtgggaggatcgtgcttgagcccagaattcgagaccagcttgggcagcatagtgagaccccatctcagaaaaaaaagaaagcaaagattaagattttctcgggaaccctggggaggaagtgtacagagagtgatagtccccgagcacttccacctgcctctgaggtccttccccccatgttgcctcagagggctgaggactatgggcctgtggaggtgatctcccattggcaccccaacatcaccatcaacatcgtggacgaccacacgccgtgggtgaagggcagtgtgccccctcccctggatcaatgtaagctccccagccctgccagctgcctgcagagcctttgagagggtgctcggggtccatctccttgtcttctcctggccctgtccccctgagagagctttccagggctccaccctcccaagctcccaccctgtcctatccccttcccatgtcctctccctctcccacaccaccacccctggggaccccaggactgacttctacacgccagcatcggtccgcaatcaagtgccatccagcccacaaactgttttcaaaaaatgtcttatcacttgccagcttttgaaattgaggcagtatcacttaaaagccacaatttctggcttattttataaaactgggttacatggtcacccacagggcagccgtgggctggagctgagccacagctgcccccttcagtggggacctgcctgccctttgcctcagtcccctctgctgaggtcaaggcaccctttagctcctcatggtgtggcctagaaatgtcccctgtcctccagtctctgtagaggggccctgttgggtctctccagacatctgaggcctgcgggtaccctggcctcctgcccgggccaaatggtgcccctgccccacgtgctgcagatgtgaagttcgacgccgtgagcggtgactactatcccatcatctacttcaatgactactggaacctgcagaaggactactaccccatcaacgagagcctggccagcctgccgctccgcgtctccttctgcccactctcgctttggcgctggcagctctatgctgcccagagcaccaagtcgccctggaacttcctgggtgatgagttgtacgagcagtcagatgaggagcaggactcggtgaaggtgagtgcggccggtgtgggcgggacttcccggtgccttcctgggcgcaagaggccaagaggaagtgtgccaggcctgggctgtgggacctcccgcctggtgctcctctgcccacagtttcacaacctcccaggtcccttctccacagtgaaaggaagtgggcacccagccctccagccctagatgactgggggtcctctccccaggctgttctgttggaccctttgggtccagacctgtcccttcctccttctgtcccagaccttgtgtccctggccctggctccaactctgtgtctctgccatctcactgggtcctgaaatgtcagcctgtgtctgtggcgtgaggctcggctttgcctcctgggctgtcgtcactgttgggtctctgctcctggctcccagtgtcccttcacccactccccgcagcactcccttggcctctgcctcttcccctagtgccatctccccgtctcttctgtctttgtgagtcaccctcctctctctccccatctgcccatctctgacccagtctcctcctggctggcccaccttcagcctccctctacaggcggccccaggggcagccctcgggacaaaagctagtgaaggtgctcctgggtggggacaggctgtgctcacatgtgtcccctgcaggtggccctgctggagaccaacccctacctgctggcgctcaccatcatcgtgtctatcgttcacagtgtcttcgagttcctggccttcaagaatggtaggaacaggaccccagggctagtgagaggctgtgcagggtgggggacaggacctgcccccttcctcctcccctccctccccacatgtcctccccctgcctggggtctctcagccccactctccagaggcctagtgagctggggaggggcagtggccccaaaactcccaacccagaaattcccacccaccgggtgtggagctgagggaggggctggcccgctggtggggcagaggccaggccaatactgccaggaagcagggctggggaactccagagccaagagcagggaagccccggagctgctcccgccaccctgcccggcaggctgcctgctgcgggaggccgcttagggctgagtggacggggcctgcccaagtgggaaggaggagcactgtcccccaaaggtccctaggttctaaggctgaccatactgatggccagcgtttgaggagaagcagccacatgccaggcactgtcctgggtaccctccccagtagctccttgagccctgtgggagccagaggctcagggatgtcacttgcccagtcacacggttcctaaggggcagatggttccagccccaactctcatcttctaggccctgcaggccacttcttccttgcccagagcaccccagtctgaaggagtggcctgcggccctgtagctcccgcaggcggcaagaggaatgagtagtagtattcctggtattaagatgctattgccggcctggtggtggctctcgcctgtaatcccagcactttgggaggccaaggtgggaggatcacctaagccccggagtttgagaccagcctgggcaacaaagcgagattcgtttctacacaattttttttaagaattagctgggcatggcagcgtgtgcctatggtctcagctactcgggaggcttgggcctgaaaggtcaaggctgccgtgagccatgatcacaccactgaactccatcctaggcaacagagtgacaccctgttccaaaaaaaaggacgctcttgccattattgagaactaccatctggaagaatgcagtgtcatacgggcacaggagctggtgccgaccccagccagccatctaccagctgtcgctgggagacgggacccttctgcctaggagctggcttggctggggtccagtgagaaatgaggcacaagaaggctgtcctccccagtgtcatgcagcagggggcgcaggcctcacttggcaccagtgctgtgtggcctccctggtctaaggagaggcttgggcccaactgctcccacgagaacccaccagaaccctgtctccagacccattcttctcagttgggacaggggtcattctgatgggcaggggtgggtggggtgaggctatggagtgtgccagagctctgggatgtgggggagctctgggatgtgggggagctctgggatggggtagggtgcacatggaccagaattcacagccctcactccctgagtgcagagctggccctgactctgcaggactgcagacctggctccaccactgtgctacagacgtggtggctcagcctcctgtggctgcggttagatgctcagccgggcggggtcaagagaggggtgtccgtggtgagaccagggctcagagaggagcatgctgacatggatccttggcagcatctaggcggagcactggaaggagctccagactggagcccagggcccttttcagtttcctgagcatggctgtgagccagttccttcccggtgtcagggcaggggcctggaggaggtggtcttgaagtgcatgccacagatcttccttcccagggagggcgagctggcaccatggtgtggcacagaccccgcgtcccttcagattctgccatgccaggctgtttggcctcagggaagcagcttccctgaccagtccttagcacctggcacgtggtgagccctgtccatggcaccagtcaccgtcaccatcagtcaagggactgcaccttggggtgctgggtgctgacgtcctatgggagggctccaggggtgccgcctgtctggtgctctgggggtcacccaatgaatatgagagccttcctgggagagaggggtctcgttcagcacccctcctgaggacccagccccaccccagggtgtgaggatgcaggccaagggggcctgagggagctgcagtagggtctcagcacctcctcagcctcctggttcccccctaccccctgcgcacagatatccagttctggaacagccggcagtccctggagggcctgtccgtgcgctccgtcttcttcggcgttttccagtcattcgtggtcctcctctacatcctggacaacgagaccaacttcgtggtccaggtcagcgtcttcattggggtcctcatcgacctctggaagatcaccaaggtcatggacgtccgggtaaggctggggcgccatgctgtctcgggagctgcaggggttgggagggggtagtgtggcccagctggaccctggagctggcccccgggggattcccagcaagtgcctcactcccaggactgaggggattttctcaccaggggattttttgggtcacacatggggcaggggaactgggaacggtggggaagggcaggggctggttctggcttgtggggtgggagccagcgtagcaactgaccatggcacccacctcatccacagctggaccgagagcacagggtggcaggaatcttcccccgcctatccttcaaggacaagtccacgtatatcgagtcctcgaccaaagtgtatgatgatgtgagtgtcctgcacagtgggcccctgggggtggtctccaggtaccacgtatccctgaggcacccggggccggccatctgtctgccggacccatgctttacagcctgtgccacatcctctgtgtcccccatctgccataactgcttccctgggcgagtccggagtccccagggctacctggaaattccccctgcccggcctgccagaccaggtgtggtgggtgagggcggggagcagggctgccaggcagggctgaggagctggctgacagccccaccctgtggccccacagatggcattccggtacctgtcctggatcctcttcccgctcctgggctgctatgccgtctacagtcttctgtacctggagcacaagggctggtactcctgggtgctcagcatgctctacggcttcctgctgaccttcggtgagcggtccggccgccccaggagagagcaggccccatgctgcgcagggctcacagccccagtgtaggagacagacccatccccagacagggacaacctagggtgggcagagctgggatatagggaggcccgagggcacacatggccccatctggggtcagagaggacttcagggaggacatgaacagtacgcttcagtcctcattctcagggggcctttgtgtcttgggaacaagtaaacaagtagggccaggtgcagtggctcacacctgttatcccaatgctttgggaggctgaggcaggaggatcacttgagcccaggaattcgtgaccagcctgggcaacttggcaagacccgatctctacaaaaaaacacagaaattattggggagtggtggtgcgtgcctgtagtcccagctacctgggaggctgaggtgggaggatcccttgagtccaggaggttgaagctgcagtgagccatgattacgccactgcactccagcctgggtgacagagtgagaccctgtctcaaaaaacaaaagaccgggtgaatcacagccaatagtgagtactgtgaagggcagagtggtgggaggatgcacattaataggggtccgggggcccctctgaggacaggacatttaaacagaggcctcagatatccagggagagagctgtgcggatgtgacagaaggccccaccagtgcagaggccgctggtagagtgtgcccaggtataggaagtggtagagtgtgcccaggtgtaggaagtggtgagggggctggtatggccagtgcagagtgcacaggggagaggtgggagaggccatccctctgctcatgggtgctctcactgcaggcttcatcaccatgacgccccagctcttcatcaactacaagctcaagtctgtggcccaccttccctggcgcatgctcacctacaaggccctcaacacattcatcgacgacctgttcgcctttgtcatcaagatgcccgttatgtaccggatcggctgcctgcgggacggtgaggcccggtgggcaggtgggagctcccaccggaacagggccctgaggcagtctttagggcccaggcctgagggggtgccacggccccagatggggtgctcagtctgagggggctcggccccgcccttgcatcacgccctctccacccaggcccacctggctgtggacgggccagcccgacctcacactgcctcccacccctctccagatgtggttttcttcatctacctctaccaacggtggatctaccgcgtcgaccccacccgagtcaacgagtttggcatgagtggagaagaccccacagctgccgcccccgtggccgaggttcccacagcagcaggggccctcacgcccacacctgcacccaccacgaccaccgccaccagggaggaggcctccacgtccctgcccaccaagcccacccagggggccagctctgccagcgagccccaggaagcccctccaaagccagcagaggacaagaaaaaggattagtcgagactggtcctcacctgctccggctcctggcgaccactacccctgcgtcccggccccctcgcctcccctccctgtcgccctttccctggacagatcaggccggggcggtgggaggcccgcctcaggtcagggcccagcgtgtgatgtaggggccggggcaggccagggtttgtttgtggaggcgctgtctgtccctctgtccctctgtgtttccagccatctcgccctgccagcccagcaccactgggaatcatggtgaagctgatgcagcgttgccgagggggtgggttgggcgggggtggggccgggcccccctacgggatgcccacggccgttcatcatcttgtccctcgtccccctaccacactccccctcctagaccgccgccctttaacacagtctggatttaataaattcatatgggtgtttaacttaaactcagcactgcccctcctcctcgtgccttccttcctctgttgccttggacaacagcttccagcagggatgaggtggctttcctgggtctgggagagtgacctgacacggtacgggacctgtaaaggtggggattgtgaccttgtgtcaagaaccatacctggccgggcgcagtggctcacacctataatcccaacactttgggaggctgaagtggatggatcacttgaggtcaggagtttgggaccagtctggccaacatagtgaaaccctgtctctactaaaaataccaaaattaattgggaatgctggcaggcacctgtaatcacagatactcgagaggctgaggcaggagaatcatttgaactcgggaggcggaggctgcagtgagcccagatcacacactgcactccagcctggacaacacagcaagattccatctcaaaaaaaaaaaaaaaagccatacccgccaggccaggcctcttcctcacttctcgccctcccaccagccctctgagatttcattaactggcctcatttcagattgctggggaagctgcttgcagggagctcgctgccctataccctttcctgccagctgcccctgctgggtgcaggctggagcctgccatgtgcccgctgaatgtctcctaacccgacaccaccaggcagggccaagtacagctttcagccgggtcgccatgagcacctgccaccctgaggcctcagcacagcagttggggcacgctaaatgtgtgccattggctttttgcgctgacacccactcccaattttggggagcatgggggtgaaggctcagcctgcctgagtggcacctggttggctggctgtagcactctgtgagtgttggggtgtcatatcacatccccggggctgcctgtgctgacaacagaggtggcatgagttggatttcccatcccagcccctggtgctgggactcttcgcccactggataggtgagctgagcgaggcctctgtgttctgagggctggggaccctacattcccaggtttactgttttggggggtggtctcagcaacacttctgggatagggggcccaacgctgaggaccacaccaggttccttcaggctccagctgccaccccatattgcagagccagtcaggggatccatgaggccccagggagacgatggcaccctcggagccccataccacaggtccacaggccatggcagtctcccatccctcagggcagccatgggtctccattacccgccccccaactctataccattccatggatccccggtgcccttggaggaaccccagcctctgcaccatggcctgactgacaggctcctaggaaccccggaggtacagggctctgcagccccttgagactggtgggctctccagccacctggacttcctggcctcgtcacccctggttcttcctcctctcacagctccacgcccaagcctttgacaaggcccatcagctacccccacaactccctgggggtctcacctcttcattgggaccacctgctccacctgctccatgcccctccttaccctgtggtgttcttgctcagtgttctgtctggtcccctgtcccggtcctgccctccccacatcccattcacactctagctagcagctagaggaaactcttttttttctttgagacagaatcttgctctgttgcccaggctgtagtgtagtggtaggatctcagctcactgcaacctctgcctcctgggttcaagtgattctcctgtctcagcctcctgagtagctaggattacagacatgcaccaccacgcttggctaattttttgtatttttaatagagacgggatttcgccatgttggccaggctggtctcgacctcaagcaatctgcccacctcagcctcccaaagtgctgggattacagacatgaaccaccctgcccggcccagctagaggaaactttatagtttattctactaaagcacaaacctgaccctgcccagcccttgctcagaacctactgtgggtgcacagtgacctcaggagaaagcccaggctccttactggggactgagaccttggtgatggggacacttattaacccctgcatccagcctggtcttccccctacctggatcctgcccccaggcacacaacccctgtccacttctttttttctttgagagagtcttgcgttgtcccccaggctggagtgcagtggcacaatcacagccctgcagccttgacctgctggctcaagcgatcctcctgcctcagcctcccaactacctaggaccacaggcaagtgccactacgcctgcgtaattatttatttatttatttagtatttttatttattattattattttttgagatggagtctcactcttgttgcccaggctggagtgcagtggcacgatcttggctcactgcaacctccacctcccgggttcaagcgattcttctgcctcagcctcctgagtagctgggattacaggcacccaccatcacacccggctaatgtttgtatttttagtagagacagggtttcaccatcttggccagtctggtctcgaactcctgacattgtgatccacctgcctcggcctcccaaagtgctgggattacaagtgtgagccacagcacctggccgcctgcgtaatttttaaattttttgtagagttggggtctctcgatgttgccaaagctggtttcaaactcctggcctcaagcagtcctcccagctgggcctcccaaagtgctgggattacaggcctgagccatcacagctggcttatcccttctttatcttacccatgtgtcctccaagctgtggctccaatgctcactcctgtaggaagccctccctgactgccaagttctctggggtctctcatggcagccctgcccactgtgagtcatcactggggacaggttggtctcttccactggatggagccccgtgaggacatagccagacctgtcttgatcactgctgtgtccccagcatagggccaaacacagagaagccacgccaggaatatttaatgagtgcatgttgaacaaccccaacattcactttcccagacacatgaacacatccagaagtgtggacctcggtggggctcatattcagacactggagactgtgacaagcagtcaacaaatgtaacagctgaaccctgcccctgggtagtgccgtgtgctggggtgttttgtgtatacagccaggaccaagacagacccagacctgccgtcatggggctcacagcccagcagaaatcctgagcactgaggatatctgacatgtcctttttaatttttatttttatttatttacttttttttttttttttgagatggagtctcgctctgttgctcaggctggagtgcagtggcacgatctcggctcactgcagccttcgcctgtcgagttcaagcaattctcctgtctcagcctcctgagtagctgggactacaggcacctgctaccaagcccagctaacttttgtatttttagtagagacagagtttcacatttcaccatattggtcaggctggtctcgaactcctgacctcaagtgatctgcctgcctcggcctcccacagtgctgagattacaggcatgagccacggcg[137 bp omitted]gcctcctgaatagctgggattacaggagtgcgccaccacgtccagctaatttttgtatttttagtagagatggtattttaccatgttgatcaggctggtctcaaactcctgacctcatgatccacccgcctcagcctcacaaagtgctgggattacagacgtgagccactgtgcctggcccctttttatttatttgtgttctttttgagatggagtcactgtcacccaggctggagtgagtgcagtggcacgatctcacttcactgcaacctccgcctcctgggttcaagtgattctcctgcctcagcctcctgaatagctgggattataggtgcccgccaccacaccagctaatttttgtatttttagtagacatggggtttcaccatgttggccaggctggtcttgaactcctgacctcaggtgatctgcctgcctcagcctcccaaagtgttgggattacaggcatgagccaccgtgcctggccctgacatgtccttttagtcattcagcaaactttttttttttttttttttttttgagacagtctcactctgtcacctaggctggagtgcagtggcgtgatctcagctcactgcagcctccacttcctgggttcaagtgatcgtcctgcctc[134 bp omitted]ggcctcccaaagtgctgggattacaggcatgagccactgcacccagcctcaacaaacatttttgaggcctggcattggcaagaggcagagaggaatcaggagagcttctggtcctataacaattggagctgctatttgtcatccttatcataagccaagcactagtgtaagtgctgcatgtggttggcttcatccattacatttaatattattcagtgtcctcgtcaccttactggtccatcactctgccctcatctctacccctttcctgtcagtcactctgcaccagccttcttgctattccttaagcatgccatgcatgttcctaccacagggcctttgcacgtgctagcccctgtgctttgaacactctcccccagatatccacatgaatccctcacctcctttgactccctgttcaaatggcacctctcagaccctgatcttcctaacccaaactatcttccgaactccttctcgttatcctgctctatcctgtaatactgccatcaccatcagacataatatttgcttatctgttttccatctgtctcctcacttggatttccttgatggcaagggctttttgtctgctgtgtgccttgctatgtccctagcttttagagcagtgcctgacactgttacgctgtgtgtaataactgtaaattgaagagccaggcacagtggctcacgcctgtaatcccagcgctttgggaggttcgggcagaaggatcacttgaggctaggaggtcaagatcagcct[138 bp omitted]ggtgaaaccctgtctctactaaaactacaaaaaattagccaggcatggtggcgggcgcctgtagtcccagctactcgggaggctgaggagcagaatggcgtgaacccgggagtaggagcttgcagtgagccgagatcgcgccactgcactccagcctgggtggcagaggaagactccatctcaacaaaaaaaaaaaaagaaagaaatagggctgggcacagtggctcacgactgtaatcccagcactttgggaggccaagacaggcggatcacctgaggtcaggagttcaagaccagcctggacaacatggtgaaaccccatctctactaaaaaaaaaaaaaaaaaaagaaagaaagaaatgtagtcccagcactttgggaggctgaggtaggcagctcgcttgaatccaggagtttgagaccagcttgggcaacatggtgaaacctcatctctgctaaaaacacaaaaattaggccaggcatggtggcgcacacctgtggtcccagctcaccagctgtgtggcctcaggcaactgacttcatctctctgagcttcagtttcccgtctgtaaagtgggtctaataataggacggtcatgagtattaaataaaatgatgttaatagttagttgccctttggccaggtgcactggctcagcctaagcaacagatcctctctctacaaaaatagaaaacaggctgggcgcagtggctcatgcctgtagtcccagctacttgggaagctgaggcaggagaatcgcttgaacccgggaggcagagattgcagtgagctgagatcgcaccactgcactgcagcctgggtgacagagcgagactccatctctcaaaaaaaaaaagaaagaaaagaaaagaaaacattagccggatgcggtggtgtgtgcctgtagtcccagctactctggaggctgaggtgagaggatccccttagtccaggaggttgaggctgtggtgaaccatgttcctgccactgcactccaacctcggtgacagagtgacaccctgcctcaaaaaaaaaaaaaaagttcacatttgtatatagcacccacatgtgccaggccctgttctaagaattttgtgttttaaatatttgtgtctattaatttgtgtgaccttggagaaattaattttgccgggtttcagttttctcatctgctatgtggggatcaataacaccatatacttcacacaattgttgtgaacattcaacttacagagttatttctttttctttttgagacaaggtctcactctgtcacccaggctggagtgcaatagcgtcatcacagctcactgcagcctcaacctcccaggctcaagcaatcctcctgcctcggcctcccaaagtattggggttacaggtgtgagccaccgtgcctagccagaacacccaaattttatacaagcaaaggaaagacaacaaaccctgcatctgtggtctgagagcgcctggcatccaacttagaacctaatagatcacctagtcgttctcaggaatatgagaggcttaggaatgtgatctagccaaatggctgcccctctttcagcctgagtcccttctgcaataatcctatcatatgcttctggcgctggtgatagggatgagctcagggtttaggcacacagctcaggatgtatacggaggctacactgctgccattcgcagactgaataactgagcttttgagctcaaagtggtctgggctatttatgggtaactttcaggggctgcagggaggaacaaaccaataaataaaacatccatgcattcatccaataaacttttttttttttgagatgggagtctcgctctgttgcccaggctggagtgcagtggcacgatctcagctcactgcaacctccgcctcccaggttcaagctattctcctgcctcagcctccggagtagctggcattacaggcgcacaccaacacgcccagctaatttttgtatttttagtagagatgggatttcaccatgtcggtcaggctggtctcgaaatcctgacctcgtgatgtgcctgcctcggcctcccaaagtgctgagattacaggcatgaaccaccgcgcccggcctccaataaacatttattgggcacctacggtgttccaggcgctggtctaggcgttggggttacaacaacgcacaaaacataaattctgaagctgacacgctagctttaaacgttccttaaatatcttcatcctcaatttacggttgaggaaactgaggtgtagcgagaccttggaggtttccgaaatattattatggatggcaggtgtagagccctgccaacctctcgatcctgaagctccccttccagcctgagaaacggcaggttcaagtcccactgggagaccaaagcggggagcggctcagtttgccggcttgctcaatgggtaaggcgtgatggctctaagcaggcctcagttgtctcgtccagagcaatgggcagcgacgcctgcccaacccctcctgagcgcccagcctccctttcccggccggccccgcccccgcgatcacgtgacgcgtgggggttttcccgttccccaggcgtgacgtcacggcggggtgcagaccaatgggcgcgcaggccggcggcgccggggaattccgccgccccgcccccgcccgccgcccgcccggcccggccccgcgccccgcgcagccccgggcgccgcgcgtcctgcccggcctgcggccccagcccttgcgccgctcgtccgacccgcgatcgtccaccagaccgtgcctcccggccgcccggccggcccgcgtgcatgcttcggtctgggccagcctctgggccgtccgtccccactggccgggccatgccgagtcgccgcgtcgccagaccgccggctgcgccggagctgggggccttaggtaagcggggctggggttcaggagaggggtctggggcggggctggagatgcggggattctggcggtcccggagtagtctgggggttcctatgggagtctaagggtttcgcgggggcagagtgagggttcctgagacactgtattagggcgtaggaagaaggcagagggtgatgagggggtacggcccgaggttcgagcgaggcgtcccgctgtagagtgagagggggcggggcctgaccctgaggcaaagaagggggcgtggcctgactcagagaaggcggagcgaaagctgctcttgggcggtatcggggcggggccgggcccagagagggagaagaggggcgggatccgacccggactatgagaagagggccgggcctgactcaaaaaaggaagcagggccctacgctgaggggtgagggggcggggcctggccgtgagggcaggaagggggcggggcctgagttggccgaaagaaggggaaggggcggggcctgactctggccgagtggaggggaagggcctgttacccaaaaaagcagggcggggcccgacacagagaatgaggagggggtggggcttgcctccagacggagaagcggagccttgacattgaaaaaattaaaagtggtctgaccctg[137 bp omitted]tgcctcagccccccgagtagctggaattacaggtgcccgccaccacacccggctaatttttgtagttttactagagacggggtttcaccatgctggtcagactggcctcgaacttctgacctcaggtgatccgcacgcctcggcctctcaaagtgctgggattacaggtgtgagcccttgtgcccagcgggatggggactttttaaactgagattgagatggggtcccctccaggcccaactttaagggagaaaaggagcgggccctgagtgtgatgaagggtggggcgaaccacagaaactaaaggccaggacctgtccatgatttagctggtaagcctggccagacgcaggggggcagtcagggcgaggggcctgatccagaggggaagggctagaagaggaaggggtggggcttccttgggatattctctggtcctctggctgccccccatcacctcctgagacgtttctccttctctgcagggtcccccgacctctcctcactctcgctcgccgtttccaggagcacaggtgagcagccctccacagttcctgcccactcgctcatgcaggatgaggttgggaggactccacagagatgtctctgtttgggggttcacgaggtccacctcagctttctcctgacagggtgcatccctccctgccagttgagatgggccccctaggttttcttacctcttggactgttaagagcgtgacaggtggccggg[138 bp omitted]cgtggtggcgggctcctgtagtcccagctactcgggaggctgaggcaggagaatggcgtgaacctgggaggcggagcttgcagtgagccgagatcgcaccactgcactccagcctgggagacagagcgagactccgactcaaaaaaaaaaaaaaaaaaaaaaaaagcgtgacaggtaaatcttaccacctatccatgcgcaaaggcttctttagagattcactgtggcttagtagaaggtaatcactgccatcctgggctttggagctggggtttacatactgctgtcatcgcccctccctgtgtgaatgtctgcaagtcagttccccagttcaggcctcagttttcctcatctgtaagatggacagaataacagtgcctctctttcagggaaattgagagtattcaatgaattgatacaggtacactttccaagcagtatctggcacacagtaagggttcagtaagtgttaactgttagtggtataataataataacgataataattattattactagacagtctataaca[141 bp omitted]ccacctcccgggttcagcaattctcctgcctcagcctcctgagtagctgggattacaggcacccgccaccacaacccactttgtgtctttagtagagatggggtttcaccatgttggccaggctggtcttgaactcctgacctcaggtaatccgcccgcctcagcctcccaaagtgctgggattacaggtgtgagccacctcgcctggccagacagtggttcttttttttttgagacggagtttcattcctgttgcccaggctggagtacaatggcgcgatctcggctcactgcaacctccacctctcaggttcgagcaattctcctgcctcagcctcccaagtagctgggattacagtcatgtgccaccacgctcagctaattttttgtatttttagtagagacagggtttct[133 bp omitted]atcatccatagcgctagttaaaacataatgtcgcctgatgtggtggctcatgcctgtaatcccggcactttgggaggccgaggtaggctcatcacctgaggtcgggagttctagaccaggctgaccaacatggagaaacaccatctctactaaaaatacaaaattagctgggcgtggtggcgcatgcctgtaatcccaaatattcaggaggctgaggcaggagaatcacttgaacctgggaggtggaggttgccgtgagccgagatcatggcattgcactccagcctgggcaacaagagtgaaactccgtctcaaacaaacaaacaaaaaaacagccggccgtggtggctcactcctgtgatcccagcactttgggaggtcgagacaggcagatcacaaggtcaggagttcaagaccagcctggccaatatgttgaaaccccatctctactaaaaatacaaaaaaaattagccaggcgtggtggcaggcacctgtaatcccagctacttgggaggctgaggcaggagaatcacttgaacccgggaggcggaagttgcagtgagcggggatcgtgccactgcactccagcctgggtgacagagcaagagcctccgtctcaggaaaaaaaacaaaaaaccatgtcaggccccacctctcgagtttctgattcagtaggtttgggatgagaaattatttgcatttttagcaagctcccaagagatgcctagaactactagtctataaagtcccccagccaaaattcagtgctgcccaaggaaatgcagaatctcaaccaaattatgacattttttcttatatacatttgccaggatttggagggcaggggtagtcctgttgttatgaatactcagtggctccagttagctgggtctgggcctttctctggagatataatcttgggatggacccaagttctggcttggccattgaagaagtgaggccggttccccaacaggtctgtgagtttagggaggatggcatcagtgacagacactgcccaagcggtggtcctgcgcaggaacaaggctgagacttttcttttttttgagacagagtctcgctctgtcacccagcctggagtgtagtgtcacaatctcggctcactgcaacctccgcctcccaggttcaagtgattctcctgcctcagcctcccgagtagctgagattataggcgtgtgccaccatgtccacctaatttttgtatttttagtagagacggggttttgccatgttggccaggccggtctggaactcctggcctcaagcgatctgcctgccttggcctcccaaagtgctaggattacaggcatgagccaccgtgcccggccaaggctgagacttttctggtccaagacctagatctttggtttcaaatgagagttatttctgatgtcatccattcaataaatatttattatgcgcctgttctgtacctggccttgtgccgagcagtgctgaggacaggcctggccctggggttccctacctagatgaggaggcagacacgtaaacaataagttaaatatgggattataaaatgtgataagggctatgaagaaaccttggggtcaatgatatttaataacagggtggggatacgagaactagtgagatagaatgggaaggaaaattccctttttgtttttggaggcagagtctcattctgtcgcctacactggagtgcggtggcgtgatctaggcttactgcaacctccgactcccgggttcaagccatcctcctgcctcagcctctcaaacagctgggattccaggcgtgtgccaccacacgcagctgatttttgtacttttagagaaacggggtttcaccacgttggccaggcttgtctcaaaatcctgacctccactgatccagccacctcggcctctcaaagtgctgggattacaggcatgagccactgtgcccagcgagaaaatccccttcattgtgaagggccagacatatgctggaccctggggataaaatgaggagaaacagacattattcccactcttcaatgctcccagtctataggagacaggtatgagtcagtgtaatgtgaggtcatgtgacat[132 bp omitted]caaaacctcatctctactaaaaatacgaaaattagctgggtgtggtggcctgtaatcccagctactcaggaggctgaggcaggagaatcacttgaacctgcgaggcggaggttgtggtgagctgagattgcatcattgcactccagcctgggtgacaacagcaaaactccatctgaaaaaaaaaaaaaaaaagaaaatgataaaacaaaggcacctgactttgagggactggagtgggggataaggggactctcttggataaaatggtcagggaagagctgtctaggatgtgacgtttgaccaaggaactgaagatggaggaggaggaagtcacgccatgcaaagaactgggggaagagcattcaggcagagaccagcctgtgcaaaggctgaggcagcacatacatagtcaatttcctgctctcacatctgctctcacgtggcccatcctggctgcccctgaatggtggcaagtccacgttgggggtaaagggaggcactgctatttgagcagaaacttgaataatttcctggctaatagaggacttgagataataataatattaactaagctttctggaagatgtcgcgtggtcagaacctgcactaagtagtttacctgtgtgattctgaatcctcatgttagttcctgaggtaggagctcacacctcattttgtagaggaagctcagagacggtaagtgacttgcccaaggctgcacagccagtgagtaacagctgagattcaaatcaactctatgtgactctacactccatgctctaaaatcatgcccatggccaggcgtggtggctcacacctgtaatcccagcactttgggaggctggggtgggtgggtcacttgaggccaggagttcgagaccagcctggccaacatggtgaaaccccgtctctactaaaagtacaaaaattagccgggcatggtggtacgagactgtaatcccagctactcaggaggctgaggcaggagaatcgctagaacccgggaggcagaggttgcagtgagccaagaatgcaccacactgtactccagcctgggtgacagagcaagactccatctcaaaaaatagaaaataggctgggcgtggtggctcacgcctgtaatcccagcactttaggaggccgaggtgcgcggatcatgaggtcaggagatcgagactagcctgactaacatagtaaaaccccgtctctgctaaaaatacaaaaaaaaaaaaaaaaaaaaaaagccgggtgtggtggtgtgcacctgtaatctcagctactcgggaggctgagacaggagaatcacttgaacccaggaggcagaggttgcagtgagccaagattgtgccactgcaccctagcctgggtgacagagcaagactccgtctcaaaaaaataaaaataaataaaataaaataaaataaaatattaaataaaagtatcttagcccaacaaggtaggcattattattgtgcccattttacagatgaagaagccaaggcacaaaaaggtgaagtaataggcttatggccccacaactagcaagttgcagagccaggatttgaacagaggcagtgaacccagagctccagccacagccgcccaggactcagtctccccctacagcccgggagcctctggagggtccaaagtctaactctgtctttgggtccccaggttcatccagcacagatgcctaagaaggattttcccagttcaagtgacttgaggttggccctgccactgacctagagcgtgtcccttcctctctgccagcctcagtatccccatctgccaaattggggggaccttggcaccctactggcttcacagatcccatgagataaggggtgcaggaaaactacctttcaaggggcaaaggtctggctgccaggagccactccctgagaacagaggaggacagatctagcagcggaacaggttcgcgtctataaatccccagccagagaccagcgcaggcagccctgggtgggacacctggctgcagctgccttccgttgctgtgtgattctaaggctcactggcggcctctgggcttccccttgtcctgtctatggaatgacgggaggtcggtttcgattcctccacgattctgtgaagggctgagctttcctggggaggtgaaaaggggcttccctgaggacccagcattactgtacctcctcacttaggaagcaggggtgaatctgggattttgggtggtcactgtgggaggacagggctggggtacagagcaagaggctgcctgggttcagatcagcctctttgcatctttttgttgttgttgttgtttgtttttgagacagtctcgctctgttgtccaggctggagtgcagtgacgcaatctcagctcactgcaacctctgcctcctgagttcaagcgattctcctgcctcagcctcccgagtagctgggattacaggtgcccaccacgatacccagctaatttttgtatttttagtagagacggggtttcgccatg[137 bp omitted]accctggggtggacttcagggagggaacacaccccaatttgtttggaaatttgggcatccactttttcctggtgctaagacccctttctaatgggttcccaaaaagacttcataatccctggtctaaatgtttttcgggaggcatttggcttagttggaggataccctgatgctgggaccccaacattagaggttgaaaggatggtagcccagaggagaagatgaggtttggggtttagtgccccagcaagtcagagcccagggtttcccaggacggaggaagacggaagggtcacaggagggacagggttggggaatctgtcttaaaagatgaaaagttgtgaccactttctggaccttacctttctctttctctttctcttccttccacagatgaattgggtgagtatcacagggcaggtttgcggggaggctgagggacccaagtgcctacagaagggggtcttggccttccttgttcagtgggggtgggggagaggtgtcactgtgtgacttccaggactgtggagggatttgaacgaagtcatgctcctaaggtacttagcagtgcttgacacttggaaaacactcagcacgccgggggctgtgtgactcacacctgtaatcctggcactttgggaggcagaggcaggaggactgcttgaggccaggagttcaggactagcctgggtaacatagtgagacccccatctctacacaaaatttttaaaaattagccgggcatggtggtgcgcacctgtagtcccagctgctcaggaggctgaagtgggaggatcacctgagcctgggaggttgccttggaagccgaggctgcagtgagctatgattgcaccactgcactgcagcctgggcggcagagcaagaccgtgtctcaaaaagaaaaccaattaaaataaaataatgttattaatcccctagtgagtacagacagacactgttttaggccctggggatttagccatgaacaaaaccaagtccctgccctcgcagagctgatagcccggtgtgggagacagaggaaaatgaacagatgagcaagataatgttagcctgggctgagagctgtgaaagaaataaacaggacgagggagagatggcctggagaagacacattaggttaggcttttctgaagagataacatacgagctgagaccaggaggagaagcagccagcatgggttgaatgggggaccgtgtg[148 bp omitted]ctgcctcagcctcccgagtagctgggagtacaggcatgcaccaacatacctggctcatttttgtatttatttatctatttatttagagatggaatttcgctcttgttgcccaggctggagtgcaatggcatgatcttggctcactgcaacctccacctcccaggtttaagtgattctcctgcctctgcctcccgagtagctggaactgcaggcacacatcaccatgcccaatttttatatttttagtggagatggggtttc[143 bp omitted]ttgctctgttgcgcaggatggagtgcagtgacgcaatctcggctcactgcaacctccgcctgacggtttcaagcgattctcctgcctcagcctcctgagttgctgggactacaggcacgtgccac[131 bp omitted]caccgcgcccagcctattatttattgagagacggagtctcactctgtcgcccaggctggcgtgcagtgtcacgatcttgacttactgcagtgtccgcctcctgggttcaagctgttctcctgcctcagcctcctgagtagctgggattacagacgtgggagaccattcgggctaatttttgtagagacggggtttcactatgttggccaggctggt[133 bp omitted]tgagagagagagagagagagagagagagagagagagagataaatgggatggaaaacgtctcgggggtaatcaagcctttttttttttttttaattttttaaagaatgggcgtcaccacccgttttttcttctcccgcagagatcatcgacgagtacatcaaggagaacggcttcggcctggacgggggacagccgggcccgggcgaggggctgccacgcctggtgtctcgcggggctgcgtccctgagcacggtcaccctgggccctgtggcgcccccagccacgccgccgccttggggctgccccctgggccgactagtgtccccagcgccgggcccgggcccgcagccgcacctggtcatcacggagcagcccaagcagcgcggcatgcgcttccgctacgagtgcgagggccgctcggccggcagcatccttggggagagcagcaccgaggccagcaagacgctgcccgccatcgaggtgggcccggcgagcggccccgggcgggtgggactggggcttcccctgcaccccggagccatccacatgcatttatacgtttatttgatggtggctgttgttgttattgttggaccagatattaattatactatcacctggcctggaatccaaaaggttcagaaaaaaggaggggtcggacatttggctgggcacggtgactcgcgcctgtaatcccagtactttgggagtctgaggcgggcggatcccttgatgtcaggagttcgagaccagcctggccaacatggtgaaaccccatctgtactaaaagtacacaaattagccgagtgtggtggcacaatcccagctatttaggaggccgaggtgggaggattagctgagcccagggaggtgcaggctgctgtgagctgagattgcaccattgcatagcagtctgggtaacagagtgagaccttgtctcaaaaaaaaagaaaaaaaaaaaagaaggcagatcgtggtgcggtggctcaggcttgtaattctagcactttgggaggtcgaggcgagcggatcactcgagctcaggagttctagatgagcctgggcaagacggcaaaaccccatctctacaaaaaatacaaaaattagccaggtgtggtggcacatggctgtagtcctagctacatggtagggctgaggtgggaggatcgcttgagcctaggaggtcaaggctacagtgagccaagatcgcaccactgcactccagcctgagcaacagagcaataccctgcctccattaaaaaacaaacaaatatatataacactggaagtaaaaaaagcaaaggtgattacttttggcagggtattaatgtattaataaggtacaggtaagttttatttttttgagacggagtcttggtctgttgcccaggctggagtgcagtggtgtgatctcgcctcactgcaacctccacctcccgggttcaagcgattctcctgcctcagcctcccgagtagctgggattacaggtccaccaccacgcctggctaatttttgtatttcttagtagagaaggggttttgccatgttggccaggctggtctcaaacccctgacctcaagtgatccgcatgccttggccttccagagtgctgggattgcaggtgtgagccactgtgcctggcctctttggtgtctgttaatctggatctgttcttcaatctgtctttgtgtttcgtgagttgaacatttgtgcagaacaggacggatgttttgtagaatgtcccacattctgaagctggtcgtggtggctcatgcctgtaatcctagcactttgggaggccgaggcaggcggatcacctgaggtcgggagttcgagaccaccctgaccaacatggagaaaccccatgtctactgaaaatacaaaattagtgcggcgtggtggtgcatgcctgtaatcccagctactcgggaggctgaggcagaagaatcacttgaatccgggaggcagaggctgcggtgagccaagatcgtgccattgctctccggcctgagcgacaagagcaaaactccttctaaaaaaaagaaaaagaaaaagaaaaaaagaatatcccacattctgggtttgttggctgtttccagattaggtcagattatgcatttttggcagaaacactccagcagtgatgctgtggccttctcagtgtctcacatcaagggacgtgggatgtcgttattcccaatattggtgatgctgagttggatcctccagctaatgtggtgactatcaggtctctccatgataaagatacaactttccctttgtaatgaattggtaagttatctatgggatgatatactgagatgtatcatcccatgtttaactgtattccccaacttctaatttctaaggcttttttttttttttttttggagacagggtctctctctgtcacagaggctggagtaaagtggcacaagcacggctcactgcagcctccacctcccaggctcaagagaccctcccacctcagcctcctgagttgctgggactacaggtgcatgccaccgtgcctggctaatttttgtatttttttgaagagttggcatctcaccatgttgtccaggctggtcttgaacttctggcctcaagcaatcctcccactttggcctcccaaagtgttggaattacatgtgtgagccaccgcaccggcctaatttctaagtcttcccaggcagttattctggctcagagtttttttttgttttttggttttttttttgatggaatcttgctctgtcacccaggctggagtgcaatggtgcaatctcagctcacagcaacctccacctcctgggttcaagcgattctcctgcctcagcctcccaagtagctgggattacaggcacgcgccatgatgtccggctaatattttgtacttttagtagagatggggtttcaccatgttggccaggctggtcttgaacttctgaccccaagtgatctgtctgcctcagcctcccaaagtgctgggattacaggtgtgagccaccgtgctcggaccccagagttggttttgatttccaagatttagaatggtaaatgcctaaccatagggaatgacctgtctccaaatctggattcaggatttttttttttttttttgagacggagtcttgctctgttgcccaggctggagtgcagtggtgtgatctcagctcactgcaacttccgcctcctgggttcaagcgattctcctgtcttagcctcccaagtagctgggattacaggtgtgcaccaccatgcccagctaatttttgtatttttagtagagacagggtttc[133 bp omitted]agtaggaaactgaggttaaaagaggggcagttacctgcacagggcacacagcaagtttactattgtaattaccgccatttactgagtgcttccatgtaccaggtactttgcatacctattttacacataaagacagtaagacccgagaggtttatcttgtagatggccagtggtagagcctggatttggtgccaggtcggacttattctaaagcctaatgggccaggcatggtggctcatgcctgtgatcccagcaccttgggagactaaggcaggaggatcacttgaggccaggagttcaagaccagcccaggtgacatggcaagatgcccgtctctataaaaataaaaaaattagccaggcgtggtggcatgcgcctggggtcccagcaccatgggaggctgaatggggaggattgcttgagcctgggaagtggaggctgcagtgagccatggtcacaccactgcactccagtctgggtgacagagaaagatgctatctcaaaaaaaaaaaagaaaaaagaaacaactaaagtctaatgttttttccacagtcccaactgacatctcaaggatgaaaagctttcagccctggagtctgcatgagtccgagactgttgactctaagcttttcagaatctcctactattacagcggggagctggttaaatgaatggttttaaccctatctgacccagtgagatttgtagacaatattacctacctctattcacagtcactcccaaagtccatattttattttattttattattattttttttttgagatgcagtctcgctctgtcacccaggctggagtgcagtggcatgcaacctccgcctcctgagttcaagtgattctcctgcctcagcctcccgggtagctgagattacaggcacctgccagcaggcccggctaatttttgtgtttttagtagagacggggtttcaccatgttggccaggctggtctcgaactcctgacctcaagtgatctgcctgcctcagcctcccacagtgctgggattacaggcgtgagccaccgtgcctggccaaaactccatattttacaccaaactgtagtataaaagagaaagaaaaggaaattaatacagcatatataatcacatttatttcaatatgtaaacgccccacaggatatatgaggaaggtggcagttgtttgtgactatatataggctccttgttaatgccgtggccacaaatgcagcctgacccagctgcgcagacttagtgacttatatgtcacacgtgcagggttgcggttggtgaggggattttccaaagtggcgaacaactcttggtctaaacaattagtgtgctggttgcaatctttgaaaattcagtgggtattacagttatgggaaactccagcctgggtgacagagttagacctcgtctcaaaaaagaaaaaggaaaaacaattatgggaaagaatattattggtgtcaaacagagcaagggccaggtgtgatgcatgcctgtaagcccagatgtttgggagactaaagtggaagtattgcttgagtctgggaggcggaggttgcagtgagctgagatcgtgccattgcactccagcctgtgcgagatcctgtcttaaaaacaaacaaacaaacaaacaaacaaatccactcagcaacaatagagcaagtttctgggatctggtcattttaaacaggtttcttattgactcgaatctttggcaggatgttcagaaggcttgctggctgtgggatggctgtgcgggactgtccctggtattataaactgtccagcataactggtcctgtctacttgcggtagggtccacatcagtgtcaaccagccaccccccaaatcccatttttcccctagggggcagcactcccccactgagaccaatggttaatggtattttataggcttgggctttagaagttcagagcaggcttcagaaggtatttaatgccagcagggctgagccagtgactcaaagctgccaagtgggactggccctgcctaacggggctggtttttatttgctgctgcctgtggctgctgagcaaaaattctggcttcacttgctatatcttccttttttaaaaaagaaaaatctggggaggccgaggtgggcggaccacctgaggttaggagttcgaggccctggaggctgggatcgcaccactgcactccagcctgggcaacagagagaatctgtctaaaaaaaaaaaaaacaattctggaaatccgaaataatgtgatgtcttataattttaattgtgggctccaagtttttcctaatcttttacttggaaaaaaaagttttagttttttcctgtctagtttttctttttaagttttattgaggtataattgatgtaagaaaaattgcacatacttaatgtatacattttgatgaatttgttattattcctttttttttttttttgagacagagttttgctcttgttgcccaggctggagtgcaatggtgcgatctctgcctctcaggttcaagcagtcctcttgcctcagcctcctgagttggtaggattacaggcctgtaccatcatgcctggctaattttgtatttttagtagagagggggttttgccatgttgcccaggctggtctcgaactcctggcctcaggtgatccacccgcctcagcctcccaaagtgctgggattgcaggcacgaaccaccgtgcccagcccttttgattagtttggatgataaaagaatttaaacctagagaccaggcgcggtggctcacgcctgtaatcccagcattttgggaggccgaggcaggtggatcacctgaggtcaggagttcgagaccagcctggccaacatggagaaaccccatctatactaaaaatacaaaaattcttggccgagcgtggtggctcaggcctgtaatcccagcactttgggagac[135 bp omitted]gaggcaggagaatggcgtgaacccaggaggtggagcgtgcagtgagctgagatcgtgccactgcaccccagcctggccaacagagcgagactccatctcaaaaaagtaaaataaaataaaaatacaaaaattagccaggcatggtggcaggcacctgtaatcttagctacttagaaggtagagacgagaatggcttgaacctgggaggcaggggttgcagtgagctgagatcatgccattgcactccagcctgggcaacagagcaagactccatctcaaaaaaataaataaataagaatttaaacctacagaaaagttaaaaaataatacactgagtatctttgaaaggtgagtgcctgttatttatttatttttttttaattttttttgagacagagtttcgctcttgttgcccaggctgtagtgcaatggcgcgatctcggctcactgcaacttgtgcctcccaggttcaagcgattctcctgcctcagcctcccgagtagctgggattacagacatgtgccaccacgccctgctaattttgtatttttagtagagacggggtttctccatgtcggtcaggctggtctcgaattcctgacctcaggtgatccacccgccagattacaggcgtgagccaccgcgctcggctgaaagctagtgcctttcatctatattcaccagttgacattttgccacatctgctgtgtctctcattctgtctccgcacagccaaacatacacacacacagatacatacatttttgttttgttttgagacagggtcttgctctattgcccaggctggaatacagtgacgccatcacagctcactgaagcccggatctccagggttcaagcagttttcccatcttagcctcctgagtacctgggactacaggtgcattccaccacacctggctgatttttgtattttttgtagagatggggtctgcacatgttgcccaggctggtcttgaactcctgtgctgaagcaacccaccttccctggcctccaaaaagtgctgggattacaggtgtgagccaccacgcctggccgacacattgtttttttgatgactcatttacaaatgaattgtagccatcatgctacttcacccctaattccttcaggatgtatctcctaatcataagctcctctgtagctacaatctcattaatcacctctaggaaaattagtaatcccatcaaatcatgtaatatacagtccatatttcaatttcccaattgtttccaaaatgtgttttatagttgtttcttcctccttaatccaggatttaaccaaggatcatgttgcatttggttgtcctatctcattagtctctctccttctctctttatttatgtatttatgtatttatttattttttgagaaggagtcttgctttgtcacccaggctggagtgcaatggcacgatctgggcccaccgcaacctccatctccagggttcaagtgattctcctgcctcagcctcccgagtagctgggactacaggcatgtgccaccacgtgcggctaattttgtatttttagtagagacggtgtttctccatgttggtcagcctggtctcaaactcccgacctcagttgatccacccacctcggcctcctcaaactcccaacctcaggtgatccacccacctcggcctcctcaaactcccgacctcaggtgatcccccacctcggcctcccaaagcgtcgggattacaggcgtgagccactgtgcgcagcccttctctccttttttaaaaaaattaagatataattgatcatatatagttaagattaaagctctgaatttttacatataatgtatacatatgtagtttacacagtgtaactacctaccacccaggcacccaggtcacaatacatgatttattctctttctctctctctctttttttttttttcttttttgagacagggactttgtcacccaggctggagtgcagtgacgcaatctgggctcattgcaacttccacgtctcaggcttaagtgatcctcccacctcagcttccagagtagctgggattatagatgcctgtcaccacacctggctaatttttgtattttttatagagacggggttgcccaggctggtcttgaactcctggtctcaagcagtcctcccacctcaacctcccaaagtactgggattacaggcgtgagccactgtgcctggcccatcatttgttgtctttt[144 bp omitted]gcctcccaagtagctgggactacaggtgcccgccac[190 bp omitted]tggtggctcatgcctgtcatcccagcgctttaggaggccaaggcaggcagatcgcttgagttcaggagtttgagaccagcttgggcaatgtagcgaaactccgtctctactgaaaacacaaaaattagccaggcatggtagtgtgcgcctgtagtcccagctactcaggaggctgcggcaggagaatcccttgagcccggaggcggaggttgcagtgagctgagatctcccgccaccgcactctagcttaggtga[177 bp omitted]catggtggtgggcacttgtagtctcagctactcgggaggctgaggcaggagaatggcgtgaacccgcaggcagagcttgcagtgagcggatccagcctgggcgacagagcgagactccatctcaaaaaaaaaaaaaaaaaaagcctgagtggcctaaaaaagcagcctgtagggcagatattatatgaggccccccagttcatcagttggaagcttctggtttaggatatcaaagtggcctttttttttttttttttttttgagaccgtcatattctgtcacccaggctggagtgcagtgtcaagaactcggctcactgcatcctccgcctcccaggttcaggcgattctcctgcctcagcctcccgagcaggtgggattacaggcatgcgccaccatgccgggctaatttttgtattttcagtagagactgggtttcaccatgttagccaggctggtctggaactcccgacctcaggtgatccgcccacctcggccttccaacgtgctgggattgcaggcgtgagccacctcgcccggcccaaagtggtcttaagcaaacacattccatcatcctggtcgcgggagaaggttggggagctcccaacagaggaccctagtggggagaggattggggagctgccaaggaaggccccaaggagtttggatggacgcaggcatcggtgatgggacccccaaagaggacttctcttcctgcagctccgggattgtggagggctgcgggaggtggaggtgactgcctgcctggtgtggaaggactggcctcaccgagtccacccccacagcctcgtggggaaagactgcaccgacggcatctgcagggtgcggctccggcctcacgtcagcccccggcacaggtacccaccccctgacctccgacctctcatccttgatcatggagattctaagcgactggaggccacccatgaaactttagagcagagggcagcttgggtaaaccctccccactgcctcttctaggtgggagacaggcctggggacagtggagggcctcacttaggcctggagccttgccacacacatattcacatacattttatccctattttgtagaggaagaaactgaggctcagagagggtaaggagcacagataattgatgacagagctgggatttgactgcagacctgacttaactgcaaggtctgttctttctcttactttacaattcatctttttttttttttttttgggacggagttttgctcttgttgcccaagctggagtgcaatggttcgatctcagctcactccaacctccacctcccggattcaagtgattctcctgccccagactcccgagtagctgagattacaggcatgcgacactacacccagcgaattttttggatttttagtagaaatggggtttcac[131 bp omitted]taacttttattttgcatatgtccacaaatgcttacacaacatacagtggctacatctaaaactttgagcattttttcatagtgcaaagagacagaaaggtagtgacacacttcactgtgttacactgactttgggtagagccctaaaggcagcacgcacttcagaggtagggctgagtattgctcacactcaggtctggaagatttaattttagaaatttttaaacttagtgaaaatataagttccgagagcagagatcttgtctcttacattccctgctgtattccgagtgtctggcatagtaactggcacatagtaggtgctcaggaaatatttgtggaatgaatgaatactgccatgttatgcaatttacagacccatcagtaatgggtgagagcacctgattctccacaacctcaccagcaccgagtattatgaaacattttgatttttgctattttgatgagtgccccaaaacaaaggcatcttcattggtgtttaatttgcagttttctttccttccttcct[132 bp omitted]gtgattctcctgcctcagcctcgcaagtagctgggactgcaggcgcccaccaccacacccggctattttttttgtatttttagtacagacggg[135 bp omitted]ttgagaccgagtctcactctgtcacccaggctggagtgcaatggcacgatctctgctcactgcaatctctgcctcctggattcaaacgattctcctgcctc[412 bp omitted]gcctcccgagtagctgggactacaggcacccgccaccatgcctggctaatttttttgtatttttagtagaggcggggtttcaccgtgttagccaaggtggtctcgatctcctgacctcctgatctgcccgtatcggcctcccaaagtgatgggattacaggcgtgagccaccacgcccggcctgaagttttcctattaaagatgaagttggccagtgttctcacatggtaaagataaggcatgttctggatcttctcaagaacctttgacatgcttatttttattttttgagacagattcttgctctgtcgccaggctgaagtgcagtggcatgatctcatctctctgcaacctctacctcccgggctcaagcaattctcctgcctcagcctcctgagtagctgggattacaggtgtgcgccaccacacccagctaatttttgtatttttagtagagacagggcttcaccatgctggccaggatggtgtccctctcttgacctcgtgatctgcccaccttggcctcccaaagtgctgggattctacagatgtgagccaccacgtctggccaaaaggtttattttattttttattgtttgagatggtgtctaactctgttgcccaggctggagtgcagtggcacaatctcggctcactgcaacctctgcctcccgggttcaagtgattcttttgcctcagcctcccgagtagctgggattacaggcatgcactactatgtctgctaatttttgtatttttagtagagacagggtttc[132 bp omitted]taatgctgggacccctgggcctgggatgtcagcccctgagagcctgagccccacagcagcatctgccagagccctcctgcaggttagggccacacttgcctgctcacgagcactcctctccctcccccgtcaccccctcagttttaacaacctgggcatccagtgtgtgaggaagaaggagattgaggctgccattgagcggaagattcaactgggcattgacccctacaacggtgagcaccccctgcctgacctgaccatcccgtcctcccaaaccccttgacttccgtgctcaccctggtcccctcaccactccaggccccaccgtctcctccagccccatcccttccccgttcccctgtaccccagagagggtctccacttcccaccctcagcctccccatatctcccccgacagctgggtccctgaagaaccatcaggaagtagacatgaatgtggtgaggatctgcttccaggcctcatatcgggaccagcagggacagatgcgccggatggatcctgtgctttccgagcccgtctatgacaagagtgagttgagagtgctgtggccgttaggattgcccttggctgcaggtgtcagaatgtcccgcttacagaggcatgaatggctcaggcgctgtggctcacgcctgtaatcccaacactttgggaggtcgaggtgggaggattgcttgagcccaggagttcaagaccagcctgggcaacttggcaaaaccctgtctctataaaaaatttaaaaattagctgggtggccaggcacggtggctcatgccggtaatcccagcactttgggaggccaaggcgggcaggtcacctgagaagtcaggagtttgagaccagcctggccaacatgccaaaaccctgtctactaaaaatacaaaaattagctgggcgcagtggcaggcgactataatcccagctactcaggaggctgaggcagaagaattgcttgaacccgggaggcggaggttgcagtgagccgagatcgcgtcactgcgctccagcctgtgcaacagagtgagattgcatctcaaaaaaaaaaaattagttgggcatggtgacatgcacctgtagtcccagctactttggaggctgaggtgggaagattgcttgagcccaggaggttgaggctgcagtgagctgtgatcatgccactgcagtccagcctgggcaacagagcaagtggtgaaatcctgtctctactaaaaatgcaaaaattagctgggcatggtggcacacgtctgtaatccctgctacctgggaggcggaggttgcagtgagctgagattgcaccactgcactccagcctgggcaatggagagggactccgtctcaaaaaacaagaaaaaaaaacatcaaacccaaaatggaatcttctagtgttgtagaatgaacaatctgtacaactataccaggcagcccaagggaagaggcagcataagtaataatctctctccctttctgagagagtgcattatattccacagaatcaccctggtagacttctgcttatttttcagtggccagagcttggtcccatggccactcctagttgcagggtggtctgggaaagcaagtgcttagatttttcaccctctatagagggatacaggcatagaagaggggactgggaataactggtaggttttagccaacccatagtgactgctgtaagcatcaaaatgggatattaattcagtcagggcatttatggatgcaagtgatagaatcccaacttagccgggc[137 bp omitted]cgtcgtggcgggcgcctgtagtcccagctactcaggaggctgaggcaggagaatggcgtgaaccctggaggcggagcttgcagtgagccgagatcgcaccactgcactccagcccgggcaacagagcgagactccttctcaaaaaaaaaaaaaaagaatccttacttaaataggcttaagggggaaaaaagagaataagttattctatttgttctattaacgagaaaaaatgcagatgtagcatagtgcttcaggtctggctgcatccagggcctcagtgatgtcattagatatctgtctctttctgtctctcagctgttcttcctccatgttagaatccatgcttatatcctacctgcctggcacctctccccgactcccaaagctgcttttagcttctcttacctaatagctttgcttaaagtctcaggtctatctctcattggcctggttttggtcatttgctcctttttgacaaatcagctttggccagagggatgcactgctctgattggccaggtctggggcatgcgctcaattactgctgagctaggaagtgggctcagccctgcccaatcccagttactaagatgaggggtggtcccttgagggaaaattggaggctgttaaaagaagaggggtcaggactactagatggggaaaacaacaggtgtccactacatgattacagtctatcaaactctcctcaaggaaccttctctcacctgggaccccatcaactctccctgaggtctgagggtctcccttaaacattttttaaaaattatttttattatttttttttagagatagggtctcactctgttgcctaggcagtcatgcagtggtgcagtcatagcttactgcagcctgaactcctgggctcaagtgatcctcccagttcagcctcacaagtagctgagactacaggcatgtgccaccacacctggctaagttttatttttaaaactttgtagagctagagtctcaccatgttacccaggctggtccagaactcctgggctcaaacgatcctccctcctcggcccctcaagtgctggcattacaggtgtgagccatcatgcctggcaattttttttttcttttttgagagagatgggggtctgctatgttgcccaggctggtcttgaacttctggcctcacgtgatcttcctggctgggcccccaaaagtgctgggattacaggtgtgagctaccttgcctagcaaaggatcttcttttgttttgttatttttttgtttgtttgttttttgttttgagacggagttttcctctgtcacgatggagtgcagtggtgcaatctcagctccctgcaacccctgtctcctgggttcaagtgattcttctgcctcagcctcctgagtaactgggaccacacccagctaatttttgtatttttagtagagtcagggtttcaccatgttggccaggctggtctcaaactcctgacctcaagtgatccacctgcctcggcctcccaaagagctgggattacaggcgtgagccaccatgcccggcaaaagatcttcgttttggacagacactcaccgggcttcagcttgagggctggcgattgttcgttaaccccttctgtccgagtgacttctttctccacctggactatgggttccatgaggatcagatgccctgccttttcaattccctacgtctccagggccccggggatggcacccactgggtgcccagtaaggctttggtgactgaattctcgggattttttttaatacacttcttcctcttgctccttcccagaatccacaaacacatcagagctgcggatttgccgaattaacaaggaaagcgggccgtgcaccggtggcgaggagctctacttgctctgcgacaaggtgcagaaaggtgaggggcctggggcagcaagcttgggcagagcggggtctggcaacttggaggggtagccagggagcccgggaagatgaaaggatgagaaagagctggttaaccagggcaccagagtgcaagggtccagaacactgtctttgcagtcagacacagctgatgggttcattcactccctgagtcgccttctcacccgtctgcgtaggacgacagagactcgtctgtggtgacccatgctgcaagctaggcggtgccatcacagagctcacgacatgtccagaggactctgatgttaagggtggaattgcataaatgaacgctttacggtggttctgataagcgctatgggtaaagcaaataggacaggagaagcaactccacttcattcatctctgttcaaatggcccttcctcaaacaggcttttaaaaaaaaaagacagctggtcaccgtggctcaagcctgtaatcccagcaatttgggaggctgaggtgggtggatcacttgagctcaggagttcgagaccagcctgggcaacatggtgaaaacccatatctactaaaaatacaaaaatgagggctgggcgcagtggctcatgcctgcaatcccagcactttgggaggccaaggtgggcggatcacctgaggtcaggagttcgacaccagcctcccaacatggtgaaaccccatctctactaaaaaacacaaaaatgagctggttgtggtggcatacacctgtaatcccagctactcgggaggctgaggcaggagaatcgcttgaacctgggaggcagaggtttcagtgagccgagatcacgcctctgcactccagcctgggccacagagcaaagctctgtctcaaaaaaaagaaaaaaagaaagaaaagaaaaagacagctgggcacagcagctcatgcctgtaatcctagcacagttttggaggctgaggcgggcagatcacttgaactcaggagttcgagaccagcctgggcaacatggtgaaaccctgtctctacaaaaaataaaaaatttagcaggtgtggtagtgtgcacctgtagtcccagttacttgagaggctgaggtgggaggatcacttgagcccgggaggcggaggctgcagtgagccaagattgcaccactgctctccagccagggcgacagagacagaccctgtctcaaaaaatcaaaaccaaaaacaaaccggctgggctggtggctcatgcctgtaattctagcactttgggaggctgaggtgggaggatcacttgagcccaggagtttgagtccagtctgggcaacatagcaagcccccatctctacaaaaaaaagttctttttaattaaaaaatagccaggcattaggccggctgtggtggctcacacctgtaatcccaatactttgggaggccaaggtgggcgaatcacttatggtcaggagttcaaaaccagcatggccaacatggtgaaaccctgtctctactaaaaatataaaaattagctgggtgtggtggaacacacctgtaattccagctacttgggaggctgaggcacgagaatcacttgaacctgggaggcagaggttgcagtgagccgagatcatgccattgcacaccagcctgggcaacacagtgagactctgtctcaaaaaatgaaataaaatagccaggcatgttggggcatgtgcctgtagtcccagcacttgggaggctgaggtaggaggattgcttaagtgcaggagttggaggttacagtgagctatgatggtgccaccgcactgcagcctgggcaatagagcgagactctgtctcaaaatagaataaagtaaagtgaagaaactggttccagagatatctagtaacttccccaagttataacagagttggtagtgaagagttctagccttcctgggtttccatcttggctctaacacttgccagctgtgtgaccttggacaagtgacttcacctctctgtgccttcattttcgtctttatacaatacggtacctaatagtaccttcttcatagagttgttgtgtgacttagaggcaatctatatgtaactgacacatataaagtctcagtacatggaggtactgtgatgacgggcgatgcagtaagacaagaaaaataaatagcaggcagagtagcatcatgaatcctgactcttccgctaccagttgtgtgatgtctcaacactttcaagcctcagtttccgtttttgtttttttttttaagaaccaggctctcgctctgtctcttaaatagctgggaccacaggcgtgcgccaccatgcctggctaattttttaattttcttgtagagacaaggtcttgctgtgttggccagtctggtcttgaactcctggcctcaagtgatctgccagctttagcctcccaaagggctgggattacaggtgtgggccactatgcctggacaggcaccttttttctctgctgactgtgcctggtatccttttgccataacagatcatagctgtgagtatgactgtatgctgtcttgtgagtcctcttactgaaccacctgagggtgatcttgaggatccctggacatgagggggatattaattcttttgtttgtttgtttgaggcggagtcttgctctgtcccccaggctggagtgcagtggtgcgatcttggctcactgcaagctccgcctcccgggttcacgccattctcctgcctc[136 bp omitted]gcctcccaaagtgctgggattatgggcgtgagccaccgtgcctggcaagggggatattaattctacctacctcttaaattgttataaggattaaatgagataatatatataaaaatacataaaacaaggccgggtttggtggcttacatctgtaatcccagcactttgggaggccaaggcgggcagatcacgaggtcaggagagcgagaccatcctggccaacgtggtgaaaccccgtctctattaaaaatacaaacattagctgggcgtggttgcacatgcctataatcccagctactcgggagactgaggcaggagaattacttgaaccagggagttggaggttgcagtgagccgagatcatgccactgcacttcagcctggaggcagagtgagactccatctcaaaaacacacaaacaaaaaaaaaccaaaaataaaattagccgggcgtggtggcatatgcctgtaatcccagctattccggaggctgaggcaggagaattgcttgaacccgggaggcagaggttgcagtgagctgagatcgcgccattgcactccagcctgggcaacagagcaagactctcaaaaaaaaaaaattttaaaaagggggaatattagtcttgattttaggggaggctgggcaagttgggagcacagtggtccagatgtcctggcttagctgatgtcccccgtttcctgccagaggacatatcagtggtgttcagcagggcctcctgggaaggtcgggctgacttctcccaggccgacgtgcaccgccagattgccattgtgttcaagacgccgccctacgaggacctggagattgtcgagcccgtgacagtcaacgtcttcctgcagcggctcaccgatggggtctgcagcgagccattgcctttcacgtacctgcctcgcgaccatggtaactacagcaacccagggtgacccaccacctcggagactaggtctttggccttggggagaccccagtggggatgggaaagaggcagaactagaatgcaggctcagagctacaaagacagtgttcagatcctggctctgctgcttactggttgtgtgaccttggcctctctgagcctcattcttctgtgcaaaatggaaataatagtagctgtcctgtgacatttggagagtatttaatctttcctcccctcagcatcctgcacatgcccgggcctgtgctcggtattgctagagacacagcagtgaccagcacggcccctagctgtgtcctcatgaggcttatagtcctgaggataggggacagcctgtccctacagagtgatgaccagagtgggcaggactggaatgaagtgctcaagggctcacattgcccagagggggtacctgacccagctgtaggtgtcagggaatgcttcttggaggaggggacagctgagctgaggacaggaggatgactaagcagggaagttttctagggaaatagtgagagtggaggaagagtgctttaaacagctggaacagcaggtgcaaaggtcctgaggccggattgtgcctggggtgctccaggaacaacaaagaggccagtgtgtaggccgggcgcagtggctcatgcctgtaatcacagcactgtgggaggctgaggcaggcggatcacctgaggttaggagttcgagaccagcctgaacaacatggcgaaaccccgtctctactaaaaatacaaaaattagccgggcgtggtggtgggcgcctatagtcccagctactcgggaggctgaggcaggagaattgcttgaacccgggaggcagaggttgcagtgagccaagattgtgccattgcactccagcctgggcaacagagcaagactcactacaggcacccgccaccatgcccggctaattttagtatttttagtagagaccgggtttcgccgtgttggtcaggctggtctcggactcctgacctcaggtgatccgcccacttcagcctcccaaagtgctgggattgcaggagtgagccaccacgcccagccaagactccatctttaaaaaaaaaaaaaataggcctggcacagcagctcacacctgtaatcccaacacttcgggaggccaaggcaggcagatcacttgaggtcaggagttcaagaccagactggccaacatatagtgaaatcccatctctactaaaaaaatacaaaaattagctgggcgtggtggcgcacacctgtaatccctcctacttgggaagctgaggcaggagaatcacttgaacctggcaggcagaggttgcagtgagccaagaccgtgccactgcactccagcctggtcaacagagcaagactgtctctaaaaataaataaataaataaataaataaaggaattaattattattgatgaattacttcttgtgtgtccctggtatctccttaacagacagctacggcgtggacaagaagcggaaacgggggatgcccgacgtccttggggagctgaacagctctggtgtgtgccctctgcccctttccacccccatccccaggttctggggaggggacagctgaccccactgccctgtcccaccccaggctggggaggaagggctgtcggggaacaggggtcctcatctctgccttccctcagacccccatggcatcgagagcaaacggcggaagaaaaagccggccatcctggaccacttcctgcccaaccacggctcaggtgggtcccagctacacataagcccctgtcccctgggtgggcagagggtaagtggcagccctgcttttctggcctcttcacgccctccaagagcagccacaaggcgagtcactcagcacttagccagcaacatagagtagaaagaatgagggctttggagacagaatggaagttctgatctcttctgggccatttccttgctatgtgaacttcattaagttgttctacctctcagagcctcagggactcctttgaaaaggcccagtacatacttagctcagtggtgttttaaaatttgatctatttcttctttctttttttttttttttggagatggagtctcgctctgtcgcccagactgcagtgcagtggcatgatctcagctcactgcaacttctgcctcctgagttcaagcgattctcctgcttcaggctcccaagtagctgggactaaaggcatacaccaccacacctggctaatttttgtattttttagtagagacggtgttttaccacattggccaggctggtcctgaactcctgacctcaggtgatctgcttgcctcagcctcccaaagtgctgggattacaggcatgagccactgcatcccacctatgatcacatttaactgcatttacagcaaaacccaaaataacaggggcttcaacaggatagaacgttatttcttgtctcacatacatagtctgtagggactgaaagtggctcatgcctgtaatctcagcactttgggaggctgaggcaggtggactgcttcagtccaggagtttgagaccagcctggccaacgtggtaaaaccctgtttctactaaaaatacaaaaattagccgagtgtggtggtgcacacctgtagtcccagctacttggaggctgaggcagacaaatcacttgaacccaggaggtgaaggttgcagtgagccaagattgcaccactgcactttagcctgagcaacagaatgagacccttctcaaaacaacaacaacaacaacaacaaaacaggcctggcactgtggcttacgcctgtaatcccagcactttgggaggccaaggcaggtagatcacgaggtgaagagagagagaccatcctggccaacatggtgaaactccatctctactaaaaacacaaaaattagctggatgtggtggcacatgcctgtagtcccagctacttgggaggctgaggcaggagaatcatttgaacccaaaaggtggaggctgcagtgagccaagatggtgccactgtgttccagcctgtcaacagagcaagactccgtctcaaaaacaagaaacaaaaaacagtccataggtaggtgttccagggatggtctggtgactgcatgatcatcgagagaccgaggcttctgccattttcagttcgccaactcatggtgcaaggtggctgttgtagctccagccattacgcccacgttccagttagcagaccttagtcacatgatcacatcaggctgcaaggaaggctagaaaatagtcccttgtgtctctaaggtttgtcttgttccaaaaagagagtccctctttttttttgagatagtcttgccctgttgcctaggctggagtgcagtggcacaatctcagctcactgcaatgtccacctcccaggttcaagtgattctcctgcctcagcctcctgagtagctgggattacaggtgcccaccaccatgccctgctaatttttgtatttttgggagagaaggggtttcgccatgttggc[132 bp omitted]tattttttcttaagtccccattatgcctgagaatgacatttattttttctgacaattttgggactggtgacttcccaacttgtgtctcccatggtctggagatttcactttttgggttgtctctgtatgttggggggctttggaacctcttctcctttctcactctcagggaaaactctccacagctgtgtaggagcatggtttcaaccccagttccacaacagctgtgtgagccttccatttactttccctcagtgccttagtttacttattattaattatttttagagataaggtcttgctctgttgcccaggctggagtgcagtggtgtgatcatacttcgctgcagcctcaaactgggctcaagcaatcctcctgcctcagactgccaggtagctgggactacaggcgggcaccaccacacccagctaacttttaaataatttttttgtagagacagggtctcgtcacgttgtgctgggattacaggtgtgaaccaccacgcttggccttcaatttacttattatctgagaatggtgatagtcccacacggattctccttgggattaagagggcacctaaggccaggcttggtggctcacacctgtaatcccagcactttgggaggccgaagcaggtggatcacctgaggtcaggagttcgagaccagcctggcaaacatggtgaaaccccgtctctactaaaaagataagaattagctgggcatggcacatgcctggcctgtagttccagctactcaggagactgaggcaggggaatcaacttgaactggggaggcagaggttgcagtgagccaagagcacgtcattgcactccagccagggtgacagaatgagactccatctcagaaaaaaaaaaaaaaaggccaccttgatatcacattttgcagggagtagggcatttgatttagggcctgatcagaagttagccctaaatcacactacacttctcttgtcttcatccccgtaggcccgttcctcccgccgtcagccctgctgccagaccctgacttcttctctggcaccgtgtccctgcccggcctggagccccctggcgggcctgacctcctggacgatggctttgcctacgaccctacggcccccacactcttcaccatgctggacctgctgcccccggcaccgccacacgctagcgctgttgtgtgcagcggaggtgccggggccgtggttggggagacccccggccctgaaccactgacactggactcgtaccaggccccgggccccggggatggaggcaccgccagccttgtgggcagcaacatgttccccaatcattaccgcgaggcggcctttgggggcggcctcctatccccggggcctgaagccacgtagccccgcgatgccagaggaggggcactgggtggggagggaggtggaggagccgtgcaatcccaaccaggatgtctagcacccccatccccttggcccttcctcatgcttctgaagtggacatattcagccttggcgagaagctccgttgcacgggtttccccttgagcccattttacagatgaggaaactgagtccggagaggaaaagggacatggctcccgtgcactagcttgttacagctgcctctgtccccacatgtgggggcaccttctccagtaggattcggaaaagattgtacatatgggaggagggggcagattcctggccctccctccccagacttgaaggtggggggtaggttggttgttcagagtcttcccaataaagatgagtttttgagcctccggggtttcgtctgttctgggcttgggaaacgccctagtcccttagtagcaaagaaagcctccaggctgggggctcaggcctgtcatcccagcactttgggaggccaaagcaggaggatcgcttgagctcacgagtttgagaccagcctgggcaacatgacgaaacctagtctctacaaaaaatacaaaaattagccgggcgtggtgctgcgcgcctgtaatcccagctactctagaggctgaggtgggaggatcgcttgagcccaggaggtggacgttgcagtgagccaagaccgcaccactgcactccagcttgggcgacagcgcgaggctgtgtctcaaaaaaat[131 bp omitted]gaaaccccatctctactaaaaatacaaaaattagccgggcttggtggcgcgcgcttgtagtcccagctactcgggaggctgaggtgggagaatagctgaaacccaggaggcaaaggttgcagtgagcctagatcgcgccactgccttctagcctgggagacaaagagagactccgtctcaaaaaaataaaattaaataaataaataaaataaaaaagataaaaagataaagcatccaagctcttcccttctccgctctcccacttcttcctcgggatcccgcccctctcgactctaggacccgcctctctcgtcggcggaagtgcgctgcgcggccctccaccatgctccgccccctccccctagcgcggcctttcatttccgcttccggtgcgggccgcgcgcgagcgcagcggtgggaggcggcgaccagccggtgagtgcaggctgcggctcgacctcccggttttcgggcaggcctcagcccagcttctccctttcctcaggctctccccatgctgctgtgggcttctgctgcgtcccggccccgaggatcgctcgtccctcaccccattaggcctgacgggcctcaggccgagcccgtgccccggctgtgggccagaagttgccgcgtcgaactcggccttcggcccagcagcttatcacaggccccgcccccttgtcaaaaaaaaaaacaacaaaaaaaaaacccagcccaaatcctcaggccgcgacgcgatccacaagccccgtccaaaccttcggtctccgccctttcccgcaagccctgcccccaagctcagcccacgccctcctgtcagccagctccgcctctctcaggctctacgctctttttctttggatgctctccccaccccgccatctagatcccatctttagacctcagcttcactctggtctccttgcaacactccctccccgtgttcccactccctctagcatcttcatcttccgccacgcccttcacctgtcctcgacctccaccttcatacaactgcactgttcccttaaaagctttctccgatttcctccacctgccttcatccttattctccttatccctctaccacccagactcatacccaaccccacgcatggcccctagtgggagccttttcagttcttctctttctcttgagctccagccttaagtgctcagggtttgccttctgaccctacttcaaacactgctgatgtttcaaaacctttcattcccgactccagcgcgtggaatctaggacacccctttcccagtgatgctcacctcagaatcacctgagggtttttcagaatgcccaagcttctagatcgaagttgttagggatggacttgaacatctggcatactgttctgcagcttcacttctgctccctgaagctaagagatgtgttgtttgggatcgactctgccaccaacttgttagatgactttgattctgcccatacgggtttcacagaccatctgactttcctggtcccttcatccctcaggttgaggccccaggcttggcctcaccacaatgtggcacgaggctcggaagcatgagcggaagcttcgaggcatgatggtcgactacaagaagagggcggagcggagacgggagtattatgaaaagatcgtgagtaactggccttttgtctggggtgagggaccctgggttggggggcacagctggtcatcctggtaaaatctgggcttggaagtatgtcaagacaagaggctcatttcctcaggagtatattcattaatcttttcttgaggataatcattggtgggatcccaagggcttctgtttgttgtagcatactgtgtcgtttggtgtggcctcccagtgccgatccggtgttagcaagaaaaagggaagtctctgtaaccctcagagcagtcctgacgttagactggccacctccagaatgtctgtttcgcttattgctgtgttccccattcccagaagagctcagccactcttgagatttggcttggcacacaataggagtgagtattaagttggcctggcacagtggctcacgcctgtaatcccaagtggatcacctgaggtcacgagttcgagaccagcctggccaaaagggtgaaaccccatctctactaaagatacaaaaattagccaggcttagtggtgtgtgcatgtagtcccagctacttgggaggctgacgcacgagaattgcttgagcccgggaggaggaggctgtagtg[134 bp omitted]aaaccccatctctattaaaatacaaaaaattagccaggtgaggtggcgggtgcctgtagtcccagctactcgggaggctgaggcaggagaatggtgtgaaccggggaggggggcagagc[133 bp omitted]cctctcctgtctgatgcttcagttgtttttgcggggaagaccaaactatccctggcctaaaagacccttgtggtctgaccactcagcttcatactcggacagctccactggccttctatttctgccaccacagggctttggcctatattaccccccctcacctatttaactcctgtgtatccttgggatcccagcttgaaatggcacctgttttctaggttcagtgttcctgtcagatgacatttatatagacctttcccagttattcctgtattactgccccagcctcctccctggtctgctggcctccagtcctggctcctccagtctgtccttcctagaagagtccaagaggcctttctaaagcacaaaactgaccctgtcccttcgttgctcagagcacctctatgcctcctaagtgcccttgagagaaagcccaggctcctcactgtggcctttagggtcctgcatggcctggcctttgcccttcctccagactcacaccaccccacactctgccttgttcctttgcacaagtcattttggcctccttgctattcctccactgacccaagcgctccccagccacaggacctttgtatgagctcttcccatacctggttaactactgcttatctgtcagatctcagtcctcagagaagtcttgtttcccaagctcagtcaggtgtcctctaaaaatgccataatcatagctccctttccttcccctttgtggaatttaacacacttaagatacacatacatgggcctggtgtggtggctcacgcctgtaatcccagcattttgggggccaaggcaggtggatcacctcaggtcaagagtttgagaccagcctggctaacatgatgaaacctcgtctctactaaaaatacagaaattagctggaggtggtgaggagcctgggctttctctcaagggcacttaggagccatagaggtgctctgagcaatgaagggacagggtcagttttgtgctttagaaaggcctcctggactcttctagggaggacagactggaggagccaggactggaggccagcagaccagggaagaggctggggcagtaatacaggagtaaatggtaatcccagctactcgggaggctgaggcaggagaattgcttgaacccgggaggcataggttgcattgctctccagcctgggcaacagagtgagactccatctcaaaaaaaaaatttatatatatatatatatgtgtgtgtatgtatgtatacacacacgcacacacatacgcatacacaggttgaacatccctaattcaaaatccgaaatgctccaaaatctttttttttttttgaggcagagtcttgcttagtcgcccaggctggagtgcagtggcatgatgtcagctcactgtaacgtccaccccccaggttcaagctattctcctgcctcactcaacctcctgagtagctggaattacaggcatgtgccactatgcctggctaatttttgcacttttggtagagacagggtttc[143 bp omitted]cccactataagtggaaagtttcacatataagtactttacacaaactttgtttcatgcacaaaattatttaaaatattgtatacaattaccttcaggctgtgcttataaagtataaatgaatttggtctttggacttgggtgccatccctaagatatctcattatgaatagacaaatattccaaaatctgaaaaaatctgaagcacctctgatcccaagcacttcagataaggaatactttgtgtgtgtgtgtgtgtgtgtgtgtgtgtgtgtgtgtgtgtcccgtctctactacaaatacaaaaaattagctgggcgtggtggtgggcacctgtactcccagctactcgggaggctgaggca[137 bp omitted]tgcacatacccagctctgtgagactggggactaattatatttgggtcacgtttgtaccctagggttgggtccatcaaatatggtttgaaagaatagatgaataaaacaatattaacaatagtaattaaccatttaattgatccttcgcaggcacccccaggccatgtgagagatgcaggattttttttgaatccccacagtcacctgtgagacagagaccgctcttacttccactcagcagagaagaggaagctctgagagctccttgcttacctctgccacccaggaaggaaccacggggctaaagggagaactcatctccgatagtgtcagaaagatgtgatcatcaaggcaaggcctgggtctctgttggtcatagttgaggccccagaagtggcctaggaacacagcactcaggaatgaatagctaccttttttttttttgagatggagtctggctctgtcgcccaggctggagtgcagtggcacgatctcggctcagtgcaacctccgcctcccgggttcaagcaattctcctgccttagcctcccaagcagctgagactataggtgcccaccaccacgcccggctaatttttgtatttttagtagagacagggtttcaccatattggccaggctggtctcaaactcctgactgcaagtgatccgcctgccttggcttcccaaagcgctgggattataggcgtgagccaccacacccagcctagctgccatttattaagggcccatggtgcgccagacccagtgctcaccagcttggcatagtagtcctctgaacaggcctgcgaggtaggtattgatcatgcctgtgttaaaggtgatgccacgataacagctaacgctgttgggcagttctgtggtaaccactgtgctaactacttggcttgtgtctccgcttcatcaaagccacacccaagactaggaggtggttcttactatttccattttacagaggacaaaactggagcacggagatacgtggcttacagtcacatagcatgagggcagagctggcactataacccagtctctgacccttaacctctctaagcttttcacctgcgccttatcatgcagaaatagaggttcaaaaagatgaggcatagcaagaccccatctctgcaaaaaataataaaaaaaaattagccaggtttggtggcatgcgcctgtggtcccagctacttgggaggctgaggcaagatgagacctgggagggtggggctacagtgagctgtgattgcaccactgcactggaacctgggtgacagagtgagaccctgtctcaaaaaagaaaggtgaggtgacttgcccaaggcaacacagccaggaggtgagatcccatcatggttagtccttagaatttgggagtcatggggctctgggttcaaattctagcgatcccacttatctatagtgtgacgtgggcaagtgactgcctccctgagcccatttcctcttccacatgtgaaaggatgtcacatggacaatcagctttggctctaacaaacctagagcatccgtcagtggcttaaacaagatagatgtttatttcttagccacagaaaagccaagaggtaaccagttagctcggggacctaagccgcttctgttttgttctcctgggcacagcttctcttcctagtgttgcatcgaggtctaagaggctctggccatcatgtcttcattctatccagcagggaggaaaaagggaggaaaaggggcaaagcgctcatgccatttgttgagaaagtttctaggccaggtgcagtggctcacgcctgtaatcccagcacttcgggaggccgaggcaggaggactgcttgagcccaggagttcgagaacagcctggacaacatggtgaaaccccgtctataccaaaatatacaaaaattagccgggcatgatggcgtgcatctgtggtcccagctcctcaagaggctgaggtgggagaatctcttgaacccaggaggtggaggctgcagtgagctgtgattgtaccactgcactccagcctgagtgggagaataagaccctgtctttaaaaaaaaagtttcgggatgttttcccgtaacatttccactcctcccctgctgaccaggaagtagtcttatgaacagccgtgaggaaggctaagaggtgtagactttattttgggtcgccctgaccagatatatttggagttctgttactgttgtagcaaagggaatagatgttggttgccaattaatggtttgccactaacagtggagacaagagcatgtccttcgatgttgttggagtgttggacacatggaccactgagagcagcctggccagcgtcgctatcgctcagtaaatattagctcttgttattgacattactgttgctgatagaactggagtttggatccaggtggagggatggtgcagaggaaggaaggctggagctgagactccaggccccctccctgttagcagggaagcttgctgcattgtattccccctcaggacagtggtgacgaccaacccctctcactggataatggggaagagctcaaagaaccaatgtctatgggtgctttgtggtgcaggcctgtacaagcggcctttgtccctgtatgtgaacgtgacctgcattccgatctgggctgccaagctgtggagtatggctgggccgtggctgatggctgctttgaggaggggactctcatctcagccttgggccgagagcagaggctgtggagcgagtgtcagtgaagctgcggtagattgtggcaggctgaatgagtatgtccagatgcagttggtttctgtcttcctgatttgtcgttggtgcctgctttctctccctgtcttcagtcccaagcagactccggttctgtcattgcttctgtccttgtcaactttcctttttaatcagtggtttggataaagaaacagaatcctctgttgatacggaaataagaagtaaacaggtcgcagctcaggcgtcgcctcctccaggaagctccagactgacccccaagtctgggtcaggtgttccccctgtgggcccccatctcagcgctgtccactctaggttgtccttgtatggggacaagtctgtgtcccacactggactgtgagcccatgagggcagggccagggctatctcagttactgccataccctagcacaaggtctgcttaacagttgaatgaatgaatgaatgaatgagtaacttcatgaactcctctgacacaatctgatcctagagacaggataatccagtggttaagagttggttttgggccgggcgcggtagctcacgcctgtaatcccaacactttgggaggctgaggtgagcagatcacctgaggtcaggagtttgagaccagcctgaccaacatggagaaacgtcatctctactaaaaatacaaaattagctgggcgttgtggcacatgcctgcagttccagctacctgggaggctgaggcaggagaatcgcttgaacccgggaggcagagattgtggttagcctagatcacgccattgcagcccagcctggacaacaagagcaaaactctgtctccaaaaaaaaaagtggattttggatcttgaagaggtacttatacacttatgttcattacagcattattagcaatagccaagaggtggacgcaagctaaatgtccattgagggatacatcgagaaagaaaatgtggtctctacacataacgcaatattattcaatcttaaaaaagaaagaaatcctgtcctatgctacaatatcgatgagccctgaagatgttatgctaagtgaaataagccagtcgcaaaaagacagtattgtatgatccgctgataagtatctaaaatagttaaaccttgcttgagcccaggagttccaggctgcagtgaactgtgatcacaccactgtactccagcctgggtgacagagcaagactccatctcaaaaaaaaaaaaaaaaaaaacagagagagagaggaagggaggaagggagctcacttcggcagcacatatactaaaattggaacgatacggggattagcatggccactgtgcaaggatgacacaaaaattcgtgaaaccttctgtatttttggtaaagaaaaaaaaacctaaaagaaaagtcaaaccctcagaaaaagaaaatacagtgcaggttgacagggatggggggaggaggaaaggggaagttcagttttgtttcagttttgtaagatttaaaaagttctaaagctctgttgcaccacagggtggatgtagttactactactgtactgtacacttaaaaatgttaagatggtaaatgttttctaccacaataaaaaaattattcttggccagatgtggtggctcacacctgtaatcccagcattttgggtggctgaggcaggcagatcacctgaggtcaggagttgaagaccagcctggccaacgtggtgaaatcccatctctactaaaaatacaaaaaattagccaggcaggttggtgcatgcctgtactcgggaggctgaggcaggagaatcgcttgaacctgggaggcggaggttgcagtgagccgagatcatgccattgcactccagcctgggcaacaagagtgaaactcttgtctcaaaacaaacaaacaaaaaattactcttaaaaagcaaataaataaaaagaagcagattttgtagtcaggcccatctgggttcaaatcctagttctgcttattcctaatgtcaggcaggtggaccccatggctttgagcctcagtttact[155 bp omitted]caaaaaattagccaggcattttggtgcatgcctgtactcgggaggctgaggcaggagaatcgcttgaacctgggaggcggaggttgcagtgagccgagatcatgccattgcactccagcctgggcaacaagagtgaaactcttgtctcaaaacagacaaacaaaaaattactcttaaaaagcaaataaataaaaagaagcagattttgtagccaggcccatctgggtttgaatcctagttctgcttattcctaatgtcaggcaggtggaccccatggctttgagcctcagtttact[133 bp omitted]agccctgtctctactaaaaataccaaaattagccaagcgtggtggcgggcacctgtaatcccagctactcgggaagctgaggcaggagaatcccttgaacttgggaggcagaggttgcagtgagccgagatcgcgccattgcactccagcctgggtgacagagcgagactctgtttcaaaaaaagaaaaagaatagtatgtttcttccatggttgggacattcgagtgagacagtgcacataaaacagtgcctggtttttagtagggttcattgacttttccagaatctcccaacagaaccaggctctggactcctggtgtttactcccggctcagtgcttattcctttctgtgaagctgaccctgccagtagcttccctgtacctgccaaattctgtcctgcaaacagtgtcccatgagtcctggctgtgggaactgggcatttggcctggagcagcctcaggagtatgatgggatcttggccttggacttggctggcttgtcccagggcagagggagctgggtgcgctgtgtggccccagctgaggaatcagctaaggaatcgagggaggcaggcgaggtgcagcatgagtagctggactccagcagcgccacctcgctgggcctgtggtcttgagtgttccttagactcagtttctttaggtgtgaaatgagagtcacagcagcccagcacctggcacatagtgagtgcggggttgaaactagccaggtattagctgtggtcctggtgagtgactcagctccttcagcccggactgcaccttctcatctgctggctgagggctgagatggagacagagtgaggatgtgcaggagcttggaaacttggagctggtgtttttttcctgaaggggctcagagtcttcatctgttagtaaggattattcctgtctttccttcattgggtgttctcaagcgcctgctgtgggccaggccctgttctaggctttagggatatagcagccaaaacagagccctgcctcctgggagttacgttctaacatgggagaaaggtgatgaatgaatattaggtccagtggcaggtggtagcgggtgctcaaaagaaaacaagtggagttaagtgagtgaattgtgtggtatatgaattacttctcaataaagccacagagtgaaggagctggggtagataagtggggagctatttagatagagtcactgaggacggcttttaggaggagatctgaaataagcgggggagcagaagcacagaggtccgagcagaagcacggggcatgtctggaatgcccaaggaatggcgtgaggcgagggcctgtgtgcctggagcagagtaggggagggaagaaatcagagagggacaggccagcacctgtgagggctgagtggttgggagtggggtggggggtggggtgcggcccaacatgtgtcagcaaatctcctggaggcagagcccagcctggaccagactgcatccacacattgaaagatgaccaacatcattagccatcagggaaatgccagtcagaaccacaagataccacttcacccacactaggctggctgacatggaaaggacagactataacaagtagtaggccaggcatagtggctcatgcctgtaatcccagcactttgggaggccaaggcaggcggatcacctgaggtcgagagttcaagaccagccagaccaacatggagaaaccccatctctactaaaaatacaaaattagctgggcatggtggcgcatgcctgtaatcccagctactcaggaggctgaggcaggagaatcgcttgaacctgggaggtggaggttgcagtgagctgatatcgcaccattgcactccagttgaagatcctgatttctctatattcttgtcactacttgtgttttgttttgttttgttttgttttttgtttttggagatggagtctcgctcttgtcccccaggctggagtgcactggtgggatctctgcttattgcaacctacctccacctcctgggttcaagcgattctcttgcctcagcctcccaaatagctgggattacaggcgcctgccaccatggctggctaatttttttgtatttttagtagagacagggtttcaccatgttggccaggctggtctcgaactcctgacctcaggtgatccgcctgcctcggcctcccaaagtgctgggattaccggcgtgagccactatgcccgacccactgcttgttacagtctgtcctttccatgtcagccagcctagtgtgggtgaagtggtatcttgtggttctgattggcatttccctgatggctaatgatgttggtcatcttcccatgtgcggatgcagtctggtccaggctgaagtgtccacaccagtctctaaatgaacggcccggaggatgggaggtgaagagttaagggggctgatattttagagagcgaggtcttcgtactggctatgcagaagattgagccaccacctcgagaggaaccaatagcttatttcttcaatttctttttttttctctttttgagatggagtcttgctctgttgcccaggctagagtgcggtgacacaatctcagctcactgcaacttctgcctcccaggttcaagcgattctcctgcctcaggctcccaagtagctgggattacaggcatgtgtcaccacgcccagctaattttttgtatttttagtagagcctgggtttcgccatgttggtctggaactcctgacttcagatgacctgcctgccttggcctcccaaagtgttgagattacaggcgtgagccaccatgcctagccaattcccttatttctgaaggttagcaggttggttcacctctgaggtatggcccacttgaccttagaagtgagcttgctgcaggccgggcgcggtgactcatgcctgtaatcccagcactttgggaggctgaggcgggtggatcacgaggtaaggagatcgagaccatcctggctaacacagtgaaaccctgtctctactaaaaacacaaaaaattagtcgggcatggtggcgggcgcctgtagtcccagctactcagaaagctgaggcaggagaatggcgtgaacctgggaagcagagcttgcagtgagccgagacagcaccattgcactccagcctgggcgacagagtgaggctccatctcaaaaaaaaaaagaagtgagcttgctgctaagctcggttgtgtgtgagggggtggggtttggagctctgttgggtggtgacctcagtcctgtttacccctgcagaagaaggacccagcccagttcctgcaggtacatggccgagcttgcaaggtgcacctggattctgcagtcgccctggccgctgagagccctgttaatatgtaagactgatatggaaggcaggggagtgtctgaagtctgggagtcaaaacggacctggggtggtgtagagtgtggagcagagactgaagtatggacagacctttggggactcagaggcagggaaggtgtgacccgcatatgaaggtgatagtcacagggtgtaagaacaatgagcaggggttggggtggaggccccagagtagcagtcatggttggaggacttagaaatgggtggagccagggccagaggcccagaggaagcagagagtaggttgccagacccgagctggctcagggtgcctggggcccgcccctcaaataccctctaggacctggttcaagttccccactattgcttggttgtgagaaatggggccctggtgtccccaggggcagtcagatgactggcctgtttcaggtcccaggagcctgaatgtggattcagggaggcttgcaacagaagggactgagagctgggggttgaggtgagggtcatggcatggggaccaaagcaggctgagggccaggcttctaagcctcagctggcagggagcaggtgctttgtgtcctgggcagtatggaccctgaggttcttgctttcttgctcccctcccacttcaggatgccctggcagggggacaccaacaacatgattgaccgattcgatgtccgtgcccacctggaccacatccccgactacaccccccctctgctcaccaccatgtaagccacctcccagggggttgccaggcacagcgtcatacccaggagcccctgttcttttcccagcctacctgtcaccttcctaggagccgttcctatttggtaccgccctgagcctgagggggatgcctcatttcccttcctgctggcttggggggggatccactccttctctctgatttcaaggtctcgcccttccctaaagctccccagaacaggagtcggacgaacggaagtgtaactacgagcgctacagaggcctggtgcagaacgactttgccggcagtgagtgatctgtggggggacgtggggtgtggggtttgagcctggagcctggaagacctagataggtttgggaagaaaagttttatccacatactttctactaaagggccttgggttccggctccagctctacgatagactcactttgcctgcatctctttccccttctagatttggtataggggatgtctgccgaatgggttgttcccagcagagtcacgtccatataccatgccttctgactctgtggtccgtttttctttaaaaaatagagaaaatagcaagaatatgtttttatttttatttatttatttatttgaggcggagtttcgttcttgttgcccaggctggagtgcagtggtgtgatctcagctcactgcaacctctgcctcctgggttcaagtgattatcctgcctc[131 bp omitted]accttggcctcccaaagtgctggattacaggtgtgagccaccacgcccagccaagaatacgtttttaaaagcatttagaaagatggggtctcactgtgttgtccaggctggtctgaactcctgggctcaagtgatcctcctgccttggcctcccaaattgctgggattatagacatgaaacactatgcccagccaggaacagattttttacctctgtgtattttactctgcccgcacagatcagattgtgagctctaaaaaggaaatttctccttgatttaaatgaatatttgccagcatttgacaatttgccaagtgttcatgtatgtccaggaattttctcccagcccagccttatcaccattgtcattttccaaatgaggaaacagaggctcagggaaacttctcgctgctctgggcttgcccagggaggtttggatcccaacagacttgggcttttttgtctgtattatcattacatctgcacaaccacctagcaaggtaggggtgacaccccgttttggggttttttgttttttttgagattgagtcttactctgttgcccaggctggcatgcagtggcgcaatctcagctcactgcaacctccacctcctgggttcaagtgattctcctgcctcagcctcccaagtagctgggattaccggcgcatgccaccatgcccggctaagttttgt[167 bp omitted]tgtccaaggagctgggattctccacgtgtccttaaccactgctccctgttgatggaaagctcctaactcacctaccaagaaggacttgagattccctttcttgggattccctgtggagttaagggaaggatggagttctctgctgggtttgtcccttaccacctggcaggtctcggcttcctcctcgagaagggtggtggtgttgattttgttgcgtggggtggttgtaagagttgagtgagatgatgtgtataaaaccccagcaccgagcctggcacagtcagccctccatgtgggtttgctagtccagtatttgtttatttctaagatagatgcttttttgattttctaaaatcagaggctgccaaaattctagtgatcactgaggccttagaatcagggacatgtgttataattgatactgtttttgccatcattccaggccacatggcttcctggtggtagagccagggttccccttagtttcgcctcactctgcatttattcattcacttccacaaacagtcattgaacacctgcggtgtggcaatggtaggggagagggcagcagctccataatcaatgtcagtgatgccaattgcaaaccaaggtgatgtgacagacagtgtgccattctctgagaaaaataggacagaagtcctggatagaagctccctgggaggcacggataggccacaggattccaggccgagagcagcctgtgcaaagccctgtgtcagccaggactgtgagcacactggaggggcagagagaaggcccgtgtggctggagcagggagagcgagggcgcttgtgcaagacagggtcagcagggcctctcttgggctttggagacaacaagtagaaattggggtatctgctagaacaaggaagggccgtgctacatccccttctggcctgccagcctgcccacctcttgttccagatagaaaagctgaggccagccgggcacggtggctcatgcatataatctcagcactttgggaggttgaggcggtggatcacctgaggtcgggagttcgagaccagcctgaccaatatggagaaaccctgtctgtactaaaagtacaaaattagccaggcacggtggcgcctgcctgtaatcccagctactggggaggctgaggcaggagaatcgcttgaacctgggaggcggaggttgcggtgagccaagatcgcgccattgcactccagcctgtgcaacaagagtgaaactctgtcttaaaaaaataagaaaagaaaaactgaggcctagggagggaaggaaggaaggggacttacaacccactgtcccacagcgagtcagggacacgtgtctcactgcagggaagatcaggaaggctctggtacattgttgagtcccccaggctgggtgttgggggtgcaggagagcccaggtcatcccagcccacacctaacttaaaatgagccacagagaggcatgcagtggagtgacctgtgcagtcagaatggcgtgtggcactcaggagcaggttatggttctgaagggtccagccagaggcctccagaaacagtgagaatggtggtagagtgcccaagtaccaggccaggcactcactctgcccgtggtcccattttacggaaaaggaaactgaggcacagatgtgttaagtcccttgaccaaggtcgtgtgtccaaggctctgctgcagttgcttgtgtcccaccagacatagtttgattatctggaagtggtgactgccccccaaggtgcactggggttgcacctgtcttcctgccccaccgcacccttgtgttcccccactgaattcctagtgtccccaacccactctgacctggggtctcttgtttgctgcagtctcagaggagcagtgcctgtaccagatctacattgatgagttgtacggaggcctccagagacccagcgaagatgagaagaagaagtgagtcggggtctggggtgcagggggttgaggaggcaggagggctgggagccccagccaggcatggcctcttccatcctgtccaccagggtctccccgaaaccaaggatggtgttcagcacacagtcagtgctcaattaataactgtgtagaggaagaagccctgtcagggggccccggcttgccgagggctctgcgttacattttcagcttgggaagtggtgggaggtgcaggccctgtggtgagacagccctgggtttgagtcctggctgtgaggccctgagtgggaattgtctgagccttgctgtgcttccctgtaaaatggggctggcaggaggccctactgcctggagttgggaggcatgcaggagatggggcttgtgaagtacctattccagcacctgccatgtagtgagcttgcagtcagccctagctgatgtcactctggagagaggcttcttaaagccgcgtccctcaaggagtagctggggagacccgggccttatcctggagcagctgcctctgaggagcagtggccgagcagtctcacttctctcttctccacctcagtctgatgagtgcaggcctcccgccctcacacacgctattccctctgcagggcttagctctcctccaggccagctgctgttgccctggtgcacggtagcctggagccctggctcggggctgggcagctccctcagtgacaccttccctcctgctacccctgactgcttgccgccttcctccactgggaggggtcccatgggactgtactgggagcttcttggagacttcagccctcgtccacggccccagcctcaggatcctgctcaggccctgctctgttcagggcaaagctggggcacctggctgctcaggaggactctgggctgtgcccttgtgggactcatggtctaggcgggagacagaccttccccaacagagatgacccaacaaaggcagggctggggagctcaggacagtgctgacccaccctagggtaccagtcaaggacttcttggcaggtggggccctagagctcagatgtggaggaagagggaggagctgggtgtgggcaggagcagagggtcctaggctgagggagagcctgaggggagggggccgtggcactcgagactggtgtgtggggctagcctggggccctcatctccactgggcacggccctggcttaccagctcccctttctcaggctggcagagaagaaggcttccatcggttatacctacgaggacagcacggtggccgaggtagagaaggcggcagaaaagccagaggaggaggagtcagcggccgaggaggagagcaactcggacgaagatgaggtcatccccgacatcggtggggtcccctctctgccctccccacctgcagtccctgggcatcgtttctgtgtctcgtccctcaccctctgtggggcaccccgtgcttacgaaccgtgtctctctccctaccccgccccagggcacaccagcctcctgctgcccctgtctcactcctgtcctcctccgttccggccttcctctgcctcactcatctctcatttctagggtgctatttctatgatcttttcccctcctaggtgttggctccattctcctccacttgggccggcctctctctgcctttgcccctctctcctgctctcttccctcctctggaaaacaagtgttcatcctcttacagagtcagcccccatccgccaggcatctgttcaccctcctctctgccattcacctcccctctggattcccactgatcaaaccacccccaagtctctctgtttttctcatcctggttcttactccagcaactggctctttttatttatttatttatttatttttgagatggagtcttgctctgttaccgggctggagtgcagtggcatgatcttggctcactgcaacctccacctcctgggttcaagtgattctcctgcctcagcttcccaagtagctgagactaaaggcacacgccaccacgcccagctaatttttgtacttttagtagagacgggggtt[131 bp omitted]tggagccacacattgacctccgcccagccctccttcctctggcttatcacacgccctgcttccaaacacctgtgacccacaccctgcctgccacccaccgtgatctccagccgccatctttccgcccctgttcagtcctccctctcacgtcaaccccaccacacgcctcactcatccattcctccctccctccatccacccatccctccttccttccttgcctccattccattcatccatccatccatccctgcatcccttcatccatccctgcacccatccgtccatctctcccttctctttccctccctccgttcatctgccccttcaagccctgtccccgagctgcctctgtccactgtgtgttgtgctcacctctggcaagcccagtgccagcctagggcatgccaagatgagccagacttgatgccatcccttcctgaagaatccctcagtctggcgggcgccccatcatccccgcctcctggagcactgccccttctcccctgtcctctcgctcggccgtggctcctgacagcctttctcttggtgcagacgtggaggtggacgtggatgaattgaaccaggagcaggtggcagatctcaacaaacaggccacgacttatggcatggccgacggtgacttcgtcaggtgaggcctgcctgctgacacccctacccattctgtgggccccaccctggcatctcactattactcccggtattgacagccatcctgtttgtgagcatttgtgtgcctggccctgggcccaggactttacacatgcaggtccctgagcctatggtggtcgtggccccacttcatctgtgcagaaacaggctgcacccaagtcacccagcctgccctacttagtgcgacctggggcgaatctgactcttcgaagctctggggattcctaggctgggggacagcgccctctagtggagaggcttcattccctggttatttatcctggcagttgctggttgtacctctaccctgagccacaccccctgctgagctcacaagaccacacagaatggtcccagctcactgggcagtgaaccagaaacggagcctgagcatggcaccctctgcccagagccctttgtggctcccacctccctcaggaacatccagtgtcctcaccatggccgaaaggtcttacccatctggtcctctcaaccgccaccatcccccgctgcccagcctgcacagtctccttgctcctcaagtgcagaggcctgggccagcccctgggccactctgtctgctgttcgctttggacgtctgcagcttgctcccccaggtttttctctagataccctgttttgtgtggcttccctgagctccctcttgaaaactgcagcttcctctgcctttgctctaccatctaatggaccacacattttattcccttgctcattatcttctcccctagaatgtaagcccgtgcaggtgaggatttctgtttttttttttcagtgctcagttcttgatacctaagatagcacctggcacacagagggtgcttgataagtggcattgaatgaaagatacctcaggctggcgtggggtgactcaggtccctcactttctctgatgactcagtctgtgtcctccttaccctgtggcctgccccatcctccaccctaattctcacccacctctataggatgctccggaaagacaaggaggaggcagaggccatcaagcatgccaaggctcttgaggaggagaaggccatgtactcggtgaggtctgggctggagtggaaggggacaggggtgtgtcacagggagggcaccccctcaccaacctggcacccaccctactccagggacgccgctctcgacgccagcggagagagtttcgggagaagcggctgaggggtcgcaagatcagcccacccaggtagggcttctccctgaacccccaccctgctggcatctgggggaggagagcaggggcttagggcctgagaaagctctttggaggcaggcatttgacttgagaaaggagtctttctagtggggcgatgcatggccatcgtgaaggtttagaggtaggaacggccttgagggccatgtggactcctttccttgccagcccctcccctcaccctactggactgggggcccttgccagactcccaggagcccatgcacaggcggcataaggctctcaccaaggcggcagagagggcacaggctttgccctggactctcacccagttctgctgcttggcttcttcctgtgtcggagtttggacaagtgacttcccgaactctctgagcttcaattttttcctttggaaaacaaggcattatcacctacctggagagagggctgggcagtccccacagggaggtcttgggacaggtttggatgaggcaggctggcttggagaggaaagcccagcctgggtcaggaggccttgaggagaggccctgtgcaaacccatgcctctttttgccacatctcttaaaggagagtgactgagagttcctgtaaggcttaaacaacttgtaggttcagcggttggtatcggaaacattccttaaagaatagcaccaatcgtcattgctgtcagcggtggcacagaggcacacagagggtagtgcaggaacgcccaggctgggtggccatagggcctgggtttggatcccagtttcctcctttatgagctacgtaatgctggacaagtgacttcacctctctgggcctcagtttcctcagctgtgatagtctctcttttttttttcttcccccagagacagggtcttattctgtcacccaggctggagtgcagtggtgtaatcacgactcactgcagcctcaaattcctaggcttaggcgatcctcctacctcagtctccttagtagctgagattactggtatgcgtcaccacgcccagctaattaaaataaaaaatacttagtagagatggggttttgcggtgttgcccagg[133 bp omitted]cccggacccagtgagagccagagacaaggattgggaggagggatgctttcattctagggtcaggaggccaagcagaaccagagctgctgaagtccaagttcctcagagtcatgatgggtctaggacattgtagggtggggcttaagttcatgctttggacagatctgaggtgggggtgggtggaggaattaaggggaggcccccaacctggtcagcagccccctcactgtgccaggtacctagctttgggtcctcaggttggcgggcttatcccaaattcatgactgctgagatcttaagccctaatttgtcccaccccattcttttctctgtagctatgcccgccgagacagccccacctatgacccctataagcggtaagttgctctggaggaccagggaatagcagacagggagcctcctgatggggacaggggtgctgaggaggggatgggaggttcaccctgctaggccaccccaagatcacagactgcatgatatgttctgggtctgaatcatttttgtgttttccagatcactgtcttgttttcccagttttaaataaaattttttttttgagacggagtctcgctatgtcgcccaggctggagtgcagtggcacgatcttggctcactacaagctccgcctcccaggttcacgccattctcctgcctcagcctcctgagtagctgggactacaggtgcccgccaccaggcctggctaattttttgtatttttagtagagtttagtagggtttcaccg[137 bp omitted]tttctgatttaaatacagtgcagccttgtggtaaaaatgaccaaatatggcaaaacagtgtgactgagaaatcaagtcactttaatctcaatttccagaagtggccagtgggaaataacgggcactcagtagcaccgctgggcacaggtcgttgtctcgtggatgaaagagtggttggagaagggattttgtgagggaccaagctcagtctgatcccagtccccctcatccaagctccatagctctctgaagcccagttccctcttcggaatgggggtgggaatgggatcttcctcatggggctgtgggtcgaggttagatgagataaggtgttgaatggcttctggggaaataaaaggtgtaggttagtgctccatacatgggagtgtcaggaatatcagatactttctttttatttttaaaattttatatattaaaaaacacgtttgttttttttttctttaaaatattgagatggggctcaccatgttgaccaggctggttttgaagttctggcctcaagcagtcctcccacctgggccttccaaagtgctgggattacaggcatgagccatcacacctggccactttgtttttattttactaaaatagaattgcaccacactcagtgttttagaacttgctttttcctcccagattatccatgtatcttttgagtaaaacttttctgtgttttgtacagagatctgcttatctttttttttttttttttttttttttttgagacggagtctcactctgttgcccaagctggtgtgcagtggcgtgacctggactcactgcaacctctgcctcccaggttcaagcagttctcgtgccctcagcctcctgagtagctggaattacaggtgcgcgccaccatgctcggcaaattttttttgtattttttgtagagacagggttttgccttgttggccaggctggtctcaaactcctggtctcaagtgatcggcctgcctcggcctcccacagtgctgggattacaggtgtgagccaccgcgcccggcctgctcatccatttttcatagccacataaaatcagagcagttgtgtgtcattgtccttcctggttatttagcgaaggctgcatggttgtgagtcaagtccttgtccagagctgggtctccactgccctccaggctccatccacccgcctggtttcccgggtcgctgtggcccgcgctggcgctgctgttgatctgctgtgtgtgctgttcccgaagaggctccgggagcctgagctagtgagcctcctcctccctacccgcaggtcaccctcggagtccagctcagagtcccgctcccgctcccgctccccgaccccgggccgcgaggagaagatcacgttcatcaccagttttgggggcagcgatgaggaggcagccgcagccgctgctgccgcagcagcatcaggagtcaccacagggaagccccccgcacctccccagcctggcggccccgccccgggacgtaatgccagcgcccggtcggtaacgctcacgccgcccgccctacgccccggtcaccatggggggtacccggggcagaggggggccgcggctcaggcctgcgctgaccggccctccgtgccccgcctgcagccgccgctcctcctcctcctcctcctcctcttctgcctcgaggacctccagctcccgctccagctctcgctccagctcccgctctcgccgtggtgggggctactaccgttccggccgccacgcccgctcccggtcccgctcctggtcccgctcccgctcccgctcccggcgctattcccggtcccgtagccgtggccggcggcactcaggtgggggctcccgagacggacaccggtactcccgctcgcccgcccggcgtggtggttacgggccccggcgcagaagcaggtgtgtgtggctgggcgtggaggtgggaggggctgggggggcgcggtctccgatcctggggagaaggtgctcagagggaggaaacctggccgtccagctcagagaacaccccatctaaggggacaggcacaggccactgctcttccgcaggaagcccttggttggaaagggcaaggcatgggtgtttgcgtgcgcgttctggtggcagtggaggtggatcccagccgctgttttccacgacagggtgtggagaggagactgtgcatctctctctcctcaggagactgtttttgctgtcaggggttccaggtggaggggagtagaaagcgcatggacgctccagggttttctgtagcttgaagggacgggtccgggccttgagggctgggaaaccccttgcggagggggaggggcgcgttcctgtgtggccaggagcggatggggaagcgaa[132 bp omitted]gaaaccccgtctctactgaaaaaaaaattagctgggtgtggtggcacacgcctgtagtcccagctacttgagaggctgaggcaggagaatcgcttgaaaccgggaagcagaggttgcaatgagctgaaatcgtgccaccgcactctagcctggtgacagagtgagattccgtctcaaaaaaaaaaaaaaaaaaaaaaattagctgggcgtggtggcacgcgcatgtagtcccagctatgcaggaggctgaggcacgagaatcgtttcagccccgcaggcggaggttgcagtgagccgagattgtgccactgcaccccagcttgggctacagagtgagactgcgtctcaagaaaaaaaaaaaaaaaagacatttcattttggagacgacatggtgagaggctagctctagggatggtttagaaaataaagtcacctggggactggtccacccccttccggtccccttgcctgttggggtcagggctgccctgggaagggcagcgacgctgggttggtaggagcatagactgcagggcacctgcctgagtgtagagtccctgggcctctaattctgtaaaatcgcggtaatagcatccgcttctctgagctgttagaggtgtaacaggtaaacccatgtaaggtgcttaggacagggctggtgctggctaagtgccgttaatatcgtcagcatcattacctgcgttattgtagcactgatcgccatgtcagctgccttcagggtctggcaggtaaagtagaggggccaggtagagatcctgctgacctggcaagcacatgttccctccagtcggggcgttgaccgctcagcagcaggtctagtgtcacccagtctttctagttctcaggagaagttgagggtctggatttttagaggatagctcttgtttcctttacttttttttttgagacagagtctcactgtgtcactcaggctggagtgcagtggcacaatctcggctcactgcacctcctcctcctgggttcaagtgattctcccgccgcagcctcccaagtagctgggattacaggcatgcgccaccacacctggctaatttttgtatttctagtagagacggggtttcactg[139 bp omitted]acgcaattcaaaaattagccgggtgtggttgtgcacatctgtaatcccagctattcaggaggctgaggcaggagaattgcttgaacccaggaggcagaggttgcag[132 bp omitted]tattccttgtagcttacccagagcaatgacaggagaaaggcttgggggacaggtgggacctgggcacatcttgcatgccagcctgagagtgggcagtgggtggagagtcccaccagtgtcctgagcagggagaggatggggttccgcatccccagactggaacttgtgggtctgtgctgagactggtggaggacaaggggtggtccccactattgtcgagaccctggacacaagcaggatgaggtggtgggtgagggtgtagatgaggtcaccgtggaacactgttgtgcctgagctggacacggctcataaagggggagccagccatccctcccagagctcacctcccgggaagttagcaagcgggtgtctagtgagggagaggtgacgtgggccaggcagggctcatgatggcaggactgcccttaggctgagtgtatctagagcgccatctctgtagccggagggaggccggaatgccgctctgggacattttggagggagagtagcaggagaggagagtcgagcctgtcaccctgggccttgcaggaaggaggactgtggatccggacccagggtggggtgcggttggggtccctggagcctcacagtcctcctcccgccctgctgcatccccaggagccgctcccactcaggggaccgctacaggcggggcggccggggcctcaggcaccacagcagtagccgcagccgcagcagctggtccctcagcccgtcccgcagtcgcagcctgactcgcagccgcagccatagccccagccccagccagagccgcagccgcagccgcagccgcagccagagcccctcgccatcacccgcaagagagaagctgaccaggccggccgcgtcccctgctgtgggcgagaagctgaaaaagtgagcggggcgggtctggaggaagagggctgccaatctcgggtggggagggtgaacatcactgttttctttttgaggggaacttagccctaccctgggaggtctggggggtggtgtatggccctggcctgggagggtggatttcagggggacacagccctggcctggggggtctgaggaggacacaccaaatcctggaggatctgcacaattagaaccttgtcctgggtgagggtcagagggggacaggtccctgtcttacaggttctgtggggtctgagagggacatggttgcaccctggggcatctgaggcccatgccttggctacctggtctgagggcagtgctgaggctggggtcagaggtggcagctgccctttccccctcccaaccatgtcctctggccctgcccccacccaggaccgaacctgccgctggtaaagagacaggagctgccaaagtcagtaagaatttggaactcgcccgtctaattcccgtcagcagcagtgcccaagagctgggcccggtgggcctgcaggggggcccgggtgggctgggagatccagccccagggacagggaggggaggggaagggtctgcccctgtgagaaccatgtccctctcccctcctcactgtacactggggctccacctgtcactgaacctctgggagcctcagggctgtccacagcctgcccctcctccccacgtcgttctcccccccccaccccccccccgcacaaagccccaggcttttggctgaggtgggttgtgggagctctgggacacccaccccctctcccgcctcttctcccccctccccagcccaagctgacgcctcaggagaagctgaaactgaggatgcagaaggcgctgaacaggcagtgtatgttctgccctgtccctccagggtttcacagctcttctttcccttggcagtgggagcaaggagactcagcaccactttgggaggcctggcccttccctagagaggccacgcaggcacggaggtgctctggggaggaatgggtttgcatcagctccgctgccgctatgctggggcctctgcagtcaggttgacctgtctgagctc[131 bp omitted]cgtctctctaaaactacaaaaaattagccaggcatgttggtgggcgcctgtagtcccagctactcaggaggctgagg[159 bp omitted]tctctctacagtcaaggcggataagaaggcggcacaagaaaagatgatccagcaggagcatgagcggcaggtgaagtgggaaagggagggctggggtgacgggtgggtgctggcctggccacgtcctcatagccctgtctgctgcaggagcgggaagacgagcttcgagccatggcccgcaagatccgcatgaagtaagaccttgcccctccctgtcccatggccacacctcctggcctgcctggccttcccaccatgggctgctggctcaagccctgcccagctccctgtgggtggatgaaaggcagagatccctgcctggccctcggggctgtgcccagctgcctctcttgctcctctccctgaatttcctcccaccatttcgacctgcctcccgccaccgcgacctcctcccagctcttccagcctccaagtgccagtcacctttgctgtttttttggcctggcaagctgttcctgataccccttccccactcacccaccgccatgggtctttctcctgtcccagcctcagtttgcttatctcctaaatggagatacagtcactgtcccacctcacaggctgttgggaggatttgacaagatcaaggccaggcacggaggaggcacccagtagacgtagccattgggttgccaagcctggccactgtgacggagaccatttcaacactcactgtgtgcaggtgccccagtgcggcaggaaatgatgggactatcctgcctccctctgttccccaggctttcctaggaaggggctgggattccagtcagccccgccagctggggtccctctgaacctggggctccctttccaagcggggattggtggcagtaccggcccccttggtttactgtcttcctcggagtagggtgttggaagcacctgccctccctgagttcagtgtgtccagtgttcccggccagatgctcatgccatgccttcgcagggagcgggaacgccgagagaaggagagagaagagtgggaacgccagtacagccggcagagccgctcaccctccccccgatacagtgagtgtccccaccaggctgcagggctctggggcttt[139 bp omitted]ccaacatggtgacacacatacgtacacacacacacacacagattgctttagtcacaaggtgattgcagcaattagaagtgctcattccggcatgggctggtgaggggcacagatggcagccactggactctctggaaatgtcccctcatttggagacaacccctgaagttcagttttgaggacctcaccccaggtcaaggaagaggccctggccctggatgtttgctcgctcttcacctgttgttttctttccaggtcgagaatacagctcttctcgaaggtaaggaagcccatgaccctccactttcttggaagtaacacttgtcctttgatgggaggtcctggctgtcattcctccagcctcaccctgtacccacctccagttggaggggctggtctcatcccttggggaacatccttccctccacagacaagtgccccgatcactgaagcatccacggccccaggtgtgttgatgtgtgtatgccccatcctcacggcccctccctttctctttccaggcgctcaaggtcccgatcccgaagcccccattaccgacattaggcagaagagtggggggtggggaggacaagggggtgggtaaggggctcaagctgtgatgctgctggttttatctctagtgaaataaagtcaaaagttatttaattcccgtcacctgtctcagtgtcatctgtgtggttggtgcagggctctcccaccccagggcccatgggccagcagagccagctgggagggcgcttgggtttacaggccagatgccagtgctgcctgtgtgggacatcttgcccccatctgatggctaagtggcaggcccctgttcatcagaacctgccatggctcagtgaggcctgctcaggaggccagggcacagtcccaagggagagggcccagacctgcccgcagatgtggacatagggtgtcggcccagcatgtcccacatgggcccctttgcccagggcctctggcgacaggtccgggcctctccccgccctcgcctcagcccctgccctggcctcgcccgcactaggaactgggagcgcagctttctgtgccagtcctgctgcgccccaggcactgggggctggccgttccctcaccccctcactccaaaccggtctgtccagccgtccaccccacggaggggaagcctcctgccccacctcatgcaccccaagaaagccagagtccagacgggtgtaaataaaagggaaaatttacttggagaaggcgggcaaaaacgaggaggtcaatgggtgttggcagcggtaccagggacagtgaggggggctttcctgggctcaggcctcgccggccgcctcagggtgcttctgccgcaggtgtttgtccagggtggctcgcaggccgaagggcacatggcagtgggggcactcgaagcgggtgctgccaggcgtcatgccgtgcatgcggcggtggcggttgagcttactgctctgggcgcaggcgtagttgcagaactcacaggtgtaggggcgctccccggtgtgtgagcgccggtgcaccgtcaggttgctgctgttggtaaaatgcttcccgcagaactcacagctgcccccgggcccgcggctcttgccccctgacttgggcatctttttgggtgatgccttctggctgtttgcagggtcagttctttgttccgtggtgatggctccccaagtgtctccaccagggccggcttgagccccactgccaggagccccgggttcctggacacctgctgtggcggcggctccagccccctcaccaccgctgcatggaagggtgctggtgggggcagcagcatggacagccggctccggaggggctgcagaggcctgctcctggctggtgtcggccatgagggggctctggggcggcacctgccggtgggtcttcttgtggcggttgagcttgctgctctgggcgcaggcgtagggacactggtcgcaagcatagggccgctcgcctgtgtgtgagcgcatgtgcactttgaggttgctgaaggagctgagggtcttcttgcacacaggacaggtggggctccgccgggtgaggccgctgccacttgcacgggggctcttggcctcagctgctggccccaccactgccgacacggctgcagccacctcggccaggcccaggagcggggcctccggggcctctgattctgtctggtagatggacagtccgtggtcccactgggcgtgacgcagcagcttccaggccactgtgaactgtttgccacagcgcaggcagctcaaggccttcagctcctctcgttctggtaagaaaaagaggcagagtgttagtgcggacagctgccagctggacaccttctgtgggataggcactcctgcaggggcaaaggacttggcagtaacaagacacacacaccctggaaggaccaggaagctgacgctcagaggaggggtggacacgaaaaatctgtggagtgggtgctaagtacctgaaaacatttttttttagacagtctcactgtcgcccaggctggggtgcagtggcacgatctcagctcactgcaacctccacctcctggattcaagctattctcatgcctcagcctctagagtagctgggattacaggcgcccgccaccatgcctggctaattagtagagatgggggtttcaccgtgttggccaggctggtctcgaactcttggcctcaagtgatccacccacctcggcctcccaaagtgctgggattataggcatgagccactgtgctgggccatgtgtttgaaaatcttttaaaaagttatgttaactcagtaagcgcttcctacatgctaggtgctgagccatggctcatagcccggctttccctcaggacaggaaaataagatctccattttccagacaggagaactgaggcacagagaggcatttccccagggttgcacagcttggaaggggtgaagctgggatttcaatccagactactgggggagggggagagggcagaacagaggcttgcttgcttttttttttttgctttaaatttttaatttagtattttttaaagagatggggtcctgctatgttgcccaggctatttttttttttttttgagacggagccttgctctgtcgcccaggctgcagtgcagtggcgcgatctcggctcactgcaagctctgcctccggggttcacgccattctcctgcctcagccaccacgccacagggtttcaccgtgttagccaggatggtcgcgatctcctgacctcatgatctgcccgcctcagcctcccaaagtgctgggattacaggtttgagccaccgcacccggccgcccaggctattctttaacttaatggcctcaagtaatccttccgcctcagcccctcaaagtgctgggattataggcgtgagccaccatacctggctgggagcagaggcttttgaataagatttttggtttaggccgggcacggtggctcacacctgtcatcccagcactttgggaggctgaggcgggttgatctcttgaggtcagggatttgagaccagcctggccaacatgatgaaaccctgtctctagtaaaaataaaaaatagccgggtgtggtggtgcgcgcctgtaatcccggccacttgggaggttaaggcaggagaatcgcttgaacccaggaggcggaggttgcagtgagccgagatcccaccactgcactccagcctgggtgacaaaagcgagactctgtttcaaaaaaaaaaattttttttggtttaataaaaataatttttaaagtaattgagatatctgggcatggtggctcatgcctgtaatcccagcacttcaggaggccaaggcaggtggaccacctgaggtcaggagtttgagacaccagcctggtcaacatggtgaaaccctgtctctaccaaaaatacaaaaattagctggccatggtggtgcacgcctgtagtcccagctacttggagggctgaggcaggagaatcacttgaacctgggaggcggaggttgcagtgagctgagattgcaccacagcactccagcctgggtgacagagtaagactccacctcaaaataatggggtagctacagagaaagcttagcggccacctagtaaagaggtggtagtgacctgggtcccccaccctctgcatggatctcaaattgagcccccaaacctgaatttggatttctatctggaccttcggggtactctcagtggacacttcctaggtgaactagcctttccatttttcaaattctagagtcttggatgggacaacctttgtgatacaaccagtcctgggtcaagagcacaggcctgcattcaaattcagacttctctgctccctaattgtgtgaccttgggcaagacatagtcctctgtgtgcctcagttgctagaattcagggaccctagagatcccctccctttcaagggtggttgtgacctcgcttggggaatggttgagagctttggtccacataagcgctcaaacagcagagcctgtgaaaccaaggtgcccatgattctccaagccctgtagtgttttgttccagcgattccatcacagcccctcgctcgctcctccaggccactctccatgctccagctctaaagctgattcaatcagtcacaagcccctcctctttcccaccaccagaccctccctggcccaaccctaaataattccacttctcaaaagtctcagaagggcaagggccagggggctggaaactaggtttggattaagccctgcagccaacactgaccaaaagctcaccgagggtcaagccccatgtgaaggcttttaattccctcccaagagaaggaacccgggtgtccagcacccgggagctcgctcaaaccaggggattcccagcacgcggggctgggagattccatcaccgagggaagccagaagccccttccttggctctgaacactcagctgtactagcacctcaatcagaattgacagagagagacaggagggggtggcaacctccccattccagctggcctccactccccctccccccggccgctgccctccctagaggtcccctcctactgccaccctggtccagccacctggccagttatttctggccaaggggaaggagaagtgaaaccaggttggggtgtgtgttggggggggcaaaatcccgggctagtcttctggggctggccacaccctgtaggcggccctccttccctgcccagtccccccccgccccccctccaccgccaccactggtccctgccctaggacgggcaggccctggccacgcctaggctgcacccgatggggagcgagaaaggggaagtagtgctcagtgccctgccgtccagcccagcccctttccagcaggaagcccagccctcgaacttgagagggggactgcacccggctttactcacctgagccctggccgcggctggggcctctgaagagctgacagcccagcttcttgtggtccatgaaggcagtgatggcctccaacgggaaggtctgcaggcagcggccgcaggtcaacagatctgggtgtttgtcggtccagggctggcggtctgcagggaggaagcgggtggtgagcgtggggtggggccaggatgggggctgagggtgctgaaggagaggggaaaccgaaggtcagaagggggcctgaggggcaggacggggcgaaggagataaggcagggcgaggggcccatgcccaaagggaagggtcccacccgagggtcaaaggtaagggaggctgggcccagggcccggggtgctcaccgggatagttcggggtcaacggcgtccacagggtccacgggttccgcgggccgagggcgaggagggcggccccggcgggcatggggccaggggagtggtggggttcgccgccgaaccgccccgccgaggacacctccttcggggagaagggccccagccttggggcctgttggggctgcgcgtctggctcgggcttgagttcgatgacgaggtcctgcatttccatctcgtcgtctgggttggcggcgggcgcgggctctactcggcggggcgcgctgccggccttgcggcgggacatgagtcgcgggccgggcgagcgagcgggcgggcaggcaggcaggcgggcgggcggaggacgcacgagcggaggacgcgcggaccgtgcgcgctcaggtgagtgactgcggcgacccgccgcgaactcttacacgtgctggccgggcccgtggctccgcctaccagggcggggctcatgggaggggaccgagccgccctgctggggccctgacggcggcctaactcaatctaggcagtgtcccgtgcgtttggcttagtgaccaaatttaatcacaccgagttcccacaaggcattgaaacagctatccctgatcccgttttagggcgggtgaaactgagacacggcatgcccacacgcacccccaagcgagaaaaatagtcggtcacgtttcttattaggtgcctgatagtaatctgggctatttcattaaatgcattacaataaaaattcattttgcaagcattcactgagtgcctcctgtgcgccaggctctgtttgaagccctgagaatacaggagggaataaacagaagataatctttgtttgcacggagttcagacggtgggggaagacactataaacataattacgtaaaatatagatggcccttcatgatgaccagtgccatggagcaaaagaaagctggaaaggcggagagggttactggggttgagggattcaattttctcccctatgatgggaaagggcatggtggagctgaggctggagggaaggaagcccagccagtgggcctgggcattgaggaattacaaggaaagggagaggcaatacgggttggggattgagttcagtgaaaatatgggggcagatccaagcaatcttttgatcgctttaaggtcttttggttttcctgagaccggagccttaggagggttttgagcagaggaggactgtaatcatacacatcgactctgttcctagaccagaagtcgccattaaaaccaaatagccaagcagctcacctgcctccactccgcctccttgaacttccctcccctaagcagttctgtctgctcactgtttgaagtggcatcgacaccctgccccaccctcaatccctgatgagtattcttttcttcctggcaccgactgcacgacagtatagaacggcttgtggactgtcctctcccccacccaatgcaagccccctgaggtcagggcaagaacctgtcctcccccagctgtcctcagcccagatgctgatttcagatgctgatctcttggagttctgcacattgttattcaggtctgggttccattgtcctcctgagagcagagggccctgaccaacagtatctaaagtagccccaccctgctgaaggccttgcaaattacactccatgacctccatctgtccccagttccctcttggatctcactttctccatctgtcaaaggaggtagggcaggttggaactagagggttatctgaggtggtttcttcttcactgccgcctcctctgatcaccctttttttttttgtaatttttaatttttcaaaaaaaattatttttaaatagagacagggactcgctttgttgccctggttggtctgaaactcttggcttgaagcgctcctcctgcttcagcatcccaaagtgctgagattacaggtgtgagacactgcactcagcctcagaccacccaattttaagttccatggcaacccagccacccactatcccattgcccttattttactctttttttttttttttttttttgagatggagtttcactcttgttgcccaggctggagtgcagtggcacgacctcagctcactgcaacctccgcctcccgggttcaagtgattctcctgcctgagcctccggagtagctgggattacagatgcccggctaatttttctatttttagtagagacagggtttcaccatgttggccaggctggtctcgaactcctgacctcaggtgatccacccgcctcagcctcccaaagtgctggaattacaggcgtgagccaccgtgcccggcctattttattctttatacatcactttgatcaaaccctgaaggatcttgtttacatatttgctcattttaccctattctgtcccttctacccccactagaacgtaggttctaggaggcaggatgggagtctgtcttgttcataaatacaacccctactcgttcatagttaagtcaacaaatatttattgcgcacctactatgtgtctgatgatattctttcaacagatatttgcagagcaccaaattgtgtacctggcactaggccttggtgatctagtggaaagcaaaggcccacaggatccctgcgtaaagaggaccccgcaaggagaaagtgaattctgactgggcctggaatagggaggttcatattccccattcaaggcctcagtttccccctttgtaaaatgggactgcagggagagctggaggacaaaatgaccgcctctgatccagcccagctactttcttagtatgcggcatctgaaaccatgatctccaggtttcctgtagaggagcgggggttcccactggaagcaaggggttaggagtgggtatgtgtagggggatggggatgcaaagaccgagctctgcccttaacccagcagggaggaagtcttcccctctctgaacctcagtttcttcctgcctaaaatgggcatcccagacgcccccaactcgcaggcaggaagatcggtcccaagtgccccgcaaagccgcgggccaggtggcgacccgggctgtgctggcttccaagcctgcgagccagcccgcgaccacgtggggcagtggcggcggcgcgggcggaacccaggctccgcggcttgcggcctgcccgggcctctgcagcgggggcgccggcggaagtggggacaccagtagccgcggacctcggtgagtacaaggtggtggggggtcgccagcaggttccctctccccggccccagctctggacgctcaccccagtgcaacgccctgagtgacggaaagaggtaggaccgcgcctgcagcgccggctggagggacgttctggtccccagacgctcctatcagggactgtttgatcccgatcgccggcagcgggaatgccccacgcgggtggggtgaggagaagggagaaggagaaaaacttcccctccggaaaataataaatggccacgataacagaagcatcggtggcagtcatcccgctttacctggagcggaatcgctcgctcagtctgagcctggaggtgggaagaaggtccagtccgaacgcccagggcggtgtggggagtggacgcctgggggccgggaggacctacttagtataagaaaaggagagcaatgggtggtcagggcggaattgaaaggaaactgaccggccccaggggagaaggggaggggagagattctgtgcttggggttctgaccctctcgggtggccccatttagctaatttgcatcaagattcagcagccgatgatgtctgtatgtgtgtgtgtgtctgtggacacgtcaacaccttggttaattaattaggtctggcggcttctctgttgacaactcagctggttccacaccctggcaattgtgaagagttggccaaatgtttgtccactgagctgatctcctctctggagcaccggggccaccaggagggaggtctgtgaaacccctgcccctgccattgacctaagtgttgggctcttgaatctaacagactagtttttcaagtcgtgggggatgggcttgggcatttttccctgaaaccttcggaaatccttgccttggagactgaaaggataaaggcctctggggccaggtcaccagggacaatggataacgcctgcctctaccctcctgggcacaccctgtgtgatctttcttaaaccagtttcttatcaggtcacaccttggctccacagtctgcctttctacatggggcacgggtgaggaccagagtttgctccctcttcctccaccctccagcttgcaccaaggaaatgatttttttttttttttttttgaaacagagtctcactctgtggcccaggctggggtgcagaggcgtgatctccgctcactgcaacctccgtctccctggttcaagggattctcctgcctcagcctcctgcgtagctgggattacagatgcgtgccaccacatccagctaattttttttgtatttttagtagagatagggtttcaccatgttagccaggctggtcttaaactcctgacatcaggtgatctgcctccctcagtctcccaaagtgctgggattacaggtgtgaaccactgcacccagcccgaggaaagatttgacctgccagcttcactggccactttacaaaaatggggattgcatcaatatgaccaaatctcccttgttttttgtttttttttttttttttcctgatggagaaaacaaggccctatactggccctcccttaatttcattttatccagggatttaacagaattctttggccactctaatcctatctaagtcatttagtaagtactcaccctagagactagggggtttctcttgaaactcaagtgttaatctaggctcaggaaagaccctgggggctggtgaggcctgactaaattggagtgacagtggtcagagaaaataaaaaatgcaagtagggcgtgttggcgtgggcctgtaatcccagcttctcggaaggctgaggtgggaggatatcttgagtccaggagttcaagattagcgtgggcaatacagcgagacctcacctcaaagtaaataaataagtaaatgtgctttttaaaaaattagaaaatgcaaggccgggcacggtggctcatgcctgtaatcccagcactttgggaggctgaagcaggcagatcaggagtttgagaccagcctggccaacgtggccaaaccgcgtctctactaaaaatacaaaattagccatgtgcagtggtgcgcgcctgtagtcctagttacttgggaggctgaggcaggagaattgcttgaacccgggaggcggaggttgcagtgagttgagatcatgccactgtactccagcctgggcgacaagagtgagactccgtcttaaaaaaaaaaaaaaaattagaaaatgcaactatcccttaattccattcacgtggtcttccctgtcaggaaaaaaaaaaaaaaccttggagtctcccttggctgctctttccctcaaattatatatcccttatcctgtccatcaccgagggctcttgacctttctttttttgtttgtttttgttgttttgagatggagtctcactctgtcatccatgctggaatgcaatggcacgatctccgctcacttcaacctccgcttcccgggttcaagcgattcttctgcctcagcctcccgagtagctgggattacaggcacgcaccaccacacccagctaacttttgtatttttagtagagagaggtttcaccatgttgaccaggctggtctcatcctgacctcaggcgatctacccacctcagccttcaaaagtgctgggattacaggcgtgacctactgcgcccagcctcgacctttcaaacatagcctaatctgaccacttctccccattcccattgtccccagcccatactagacgccatcttcttccacctggaccactacagtgacctcctcattgcgttcctagtgtctcccttcaatctcgtttattgtccatgcagcaggcagaggatcctgaggaccttaagccagattctgcccatccttcactcagaactgtccagtggcttcagtctcagagtagagacccaaattgtcatcacagcccacaaggcactctctctgtccctgcccccacctcctccacactggccttgctacgccccaaagccaccctttccatgatctttgcattttgctcttccttctgactggaatctccacatggctccattcctaatttcattcaggtctatgctcaaacgtaatcttatcatagggatctttcctgggctcccttgaaactaccctctatcccccaggctgggtcaggtgtctcctctggactccttcattccagccctactcactttgggtcatcactgcctaaggacaggtctgtgtcccctattggactgtgagcccacaaaggcggaactgggctctcagtcctagacgtgtttccaagaccgcccaatgtgggtcatgcacagagcaggcactcagatgatgtgctaacaatgctagataatgtggatgagtgaatttttttttttttgagacagggtctcatactctgtcacccaggctggagtacagtggcacagttatggctcactgcagcctccacctaccaggctcaagcgatcccctcacctcggtctccttagtagctgggactctagtcgcacactacccatgcccagctaatttttttttttttttgtagagatggggttttgctatattgctcaggctggtcttgaactcctacgctaaagcaattctccagcctcagtctcccaaggtgctgggattatagttgtgagccaccgcacctggctagaaaacttttctttggtgcataaaaatgatataaaattcaaatttcagtgtcccagtaagtaaggttttgttggagaacagccatgttcatttgtttccatattgtctatggctgctgttgtgctactgtggcagagttgagcagtgacagtaaaatacttacagagaaggttcgcagacctctgctacgtattttgccaagaagaaaaataaaataaagttaaaattgaaaatatgttgcccgctgggcgcggtagctcacgcctgtaatcccggcactttgggaagctgaactgggggtgggtcacctgagaccaggagatgtagaccagcctggccaacatggtgaaaccctgtctctactaaaatacaaaaattagccaggcatggtggcgcgcacctgtaatcccagctactcaggaggctgaggcaggagaattgcttgaacccaggaggcagaggttgcaatgagccaagattgcaccactgcactccagcctgggggatagagtgagactccatccccaaaacaattttgccaaggaggattctatttgggccacctatgggcatgtgagatcagtaagatttggcagctaattatgcagagtgggtgatgaggtttagatgcctcccagggagagctctttttcacattttcttttccaattcttcttctttttttttttttttttgtttgagacagggtctcactcttcccaggctggagtgcagtggtgcaatcacatctcactgcagcctcagcctcctccggctcactagatcttcccacctcagcctcctgagtagctgggactacaggagcgcaccctttgcccagctaatttttctatttttctggagacgagattttgctatgttgcccaagctggtctcaaattcctgggctcaagtgatccacctgcctcagcctcccaaagttctggaattacaggtgtgagccacctcgtgcccagctgcttcttgctttctgaaattaaaatttaggccgggcacggtggctcacgcctgtaatactagcactttgggaggccaaggcgggtggatcacctgaggtaaggagttcaagaccagcctggccaacatggggaaaccccgtctctactgaaaataaaaatatcagctgggcgtggtcgcgggcacctgtaatcccagctacttgggaggctgagtgacgagaatcgcttgaacccgggaggcggacgttgtagtgagccaagatcgcgccactgcactcctgcctgggcgacaagagcgagactccatctcacaaaaaaaaaaaaaaaaaaaagaaattaaaatttagtggctgggcatggtggcttagacctgtaatcccagcactttgggaggctgaggcaagaggatcacttgagcccaggttggagaccagcctgggcaatatagtgcgacttcatctctataaaataaaataaaattaattaattaaaaattttatttatttatttatttattttgagacagagtctcgctgtgttgtccaggctggagtgcagtggcatgacctcagctcactgcagcctctggctcacgggttcaagcgattcttatgcctcagcctcctgagtagttgggattacaggtgtgtgccaccatgcctggctaatttttggggcgtttgtttgtttttgagatggagtcccagtctgtcacccagactggagtgcagtggcacaatatctcagctcactgcaacctctgcctcccgggttcaagagagtctcctgcctcagcctcctgagtaggcgggattacaggagcctgccaccatgcccagcccagctaattttatttatttatttattttttgagacagagtttcactcttgttgcctaggctggagcgcaatggcgcagtctcggctcaccacaacctctgcctcctgagttcaagtgattctcctgcttcagccttccaagtagctgggattacaggcatgcaccaccactaattacagaaatgcaccatcaggctaattttgtatttttagtagaggcagggtctctccatgttggtcaggctggtctcgaactcctgacctcaggtgatccgcccacctcggcctctcaaagtgctggaattacaggcgtgagccacagtgcccggccaacacccggctaatttttgtatttcttagtacagacagggtttcaccgtgttgaccaggttggtctcaaactcctgacctcaggtgatccgcctgcctcggcctcccaaagttctgggtttacaggcgggagccactgtgcccagcctatgttcatgtcttctatagccatctttattccttcctccctctttgtgacctgtttgtctgcatcagtgtttcatttggggccatcaggagacgtttggcaattcatggagactttaaaaaaaaactgtattgagatgcaattcacattcaccaattcactgttcaccagtggtgacatttttggctgtcacaacttgaagatgggatgctactggcatctattaataggaggcagaggctaggatgctgctcaaaccctacacctatgcgttggacagcccccacaacatagcagataattatccagccccaaatgtcaatagtgtccagactgagtagccctggttcacatccttggtctatctgcagggtcctgtcttgcaaggggctcacagttcaggtgcagagacaggaagagcctaataagaaaaaggacaagttagtccaggcacagtggctcacgcctgtaatcccaccactttgggaggctga[266 bp omitted]gcctcagcctcccgagtagctgggactacaggcgactgccac[138 bp omitted]cccggccacacaagaatctcttgaacctgggaggcggaggttgcagtgagccgaggtggcaccactgcactccggcctgggtgacagagtgagactctgtctccaaaaaaggaaaaaaaagaaacaggacaatttcaatcacctcccttctgtgcctggccccagggtcttgggtacccaacacttgtcactcagctcagttagtcctcactaggtttagagaggagaggaccaagccacagggagtggtgcagctgctaaaacctaggtcctcctctctcaggtctgcacccacaaggccagcatttccctatacacattcaacatcatagcatagcgcttcatatgtcccagacatgtgccaaacatggtaggttagttaggtaatttagtccccatgcccgccctgtgagttagggctctgttttacagatggggaaacagaggcacagattagtcaagccatttaccccaggtcacacagcaatactaacaataagagcagttcactattatggagaacctagaatgtgccaggccctgtctggcaggagcctgttgaatcctgataacagcataggcagcaattggggctatttttccatacaatggaagagaaaactgtctcttactgatgtcacacagctaaaccggcctgggatctccac[131 bp omitted]gcctcagcctcatgagtagctgggattacaggcacgtgccaccatgcccagctaatttttgtattcttagtagagacggggtttcacc[140 bp omitted]aggctggagtacagtggcacaatctctgctcactgcaacctctgcctcccaggttcaagtgattctcatgcctcaggctccccaagtagctgggattacaggcacgcaccaccacgtccggctgatttttgtattttagtacagacggggttttactatgttggccaggctgctctcgaactcctgacctctagtgatcctccagcctcagcccctaaagtgctaggattataggcatgcgccgccatgcccagctcattcatgaattctcattggtctctatggcaggcagtttctgggggctggagatccagcagtgggaaaagcaaggtggccaccttgaaactcacggagggaaaggagatacaggcagatacagggaaccgaaagtgcaagagcccaagaagggattgccaggcatcgcgcctgaggatcagcgaggaggcctgtgtggctggggtggggagagcaagcgtggtacaccacgagggtgccggcaggatccagagctaagacagaagccacaagagggctccgagcagaggagggatatgatctgactcaggcattaacagggtgttggggtgcagacggcggggggtgaaggtggaagccagggacccagtgaggagttgactacagtactccaggcaggaagtgtctgtggctgcagcaggatgctggcagtggaggaggtgagaagtgt[133 bp omitted]acctctgcttcccaagttcaagtgactctcctgcctcggcctcctgagtagctgggattacaggtgcccgccacgatgcttggctaatttttgtatttttcgtagagacggggtttca[131 bp omitted]gtcttttatgactttaatatttttgaagagcccaggttagttgtgctgtttttgtttttgttttttctaagacaaagtctcactcttgcccaggcgtggagtgcagtggcgcgatcatagctcactgcagcttcaaccttccagggctccagtgattctcttacctcagtcttctgagtagctgggacttccacgagtacattgtcaagcctggctaatgttttttatttttagtagagacgaggtcttaccatgttgcccaggctgctcttgaactcctgaacgcaagcaatcctctcaccttggcctcctgaggtgctgggattataggcatgagccaccatgcctatccctgttgtccttgtttggcccagaggctggaagatcacttgaggccagaagttcaagaccagcctcggcaacatagtgagaccctgtctctttaaaatttaaaaaaaaaagaaaaggaatagcacagaagtggtgccctgccttcttagtgtcccattcctggagatgttggctttgatcactaagttaagggggtgcataccaggttcctccagtataaatttgtgtttgccctttacagtgaatgaatatcttataagtctgttaagactatgtagataccttatacttcatcaaactcccatccatgcttttttttttttttcttttttttgacacagagtctcactctgtcgcccaggctagagtgctgtggtgcgatctctgctcactgcagcctccgccttttgggttcaaatgattctcctgccttaacctcccgagtagctgggactacaggcgcatgacaccacacccggctaatttttgtatttttggtagaggcggggtttcgccatgttgaccaggctggtctcgaattcctgacctcaagtgattcgcccaccttggcctcccaaagtgttgggattacaggtgtgagccaccgcacccggccctatccacacatttttgcatctattccttttatatttatttacttgccagtctacagtaaggattatattttccttctcttccttatttattcatttatttattattggtatggattctggatttctgttttatccagtgggttataatctgtaactatcattattgtattgttcaaataattccagatttggccactgggagccctttcaagctagctcatgtgtgagtgggaatctatctagaagatagaatttcctgatggattgggtgggttgtgtgtgagagaaagctggggtttattcttttttttagagacagtgtctcactctgtcacccaagctggagtgcagttgcacaattacagctcactgcagcctccatctcctgggctcaactaatccttctccctcagcctcctgagtagcccagctaatgtaaaatatatatatatatttttagaaatggggtctcgctatattgcccaggctggtctcaaactcccagcttcaaagtgatcctcctgccttggcctcccaaagggctgggattacaggcatgagccaccatgcctggccaggttcatcttttggcaaatatttattgcctataagttgagataaaaacattataaaagcagacaaaggtccttgccttcacggggctcatgtttttgtgcatgtgacacttttgtttctgatccaagccattgggggacgatggcacagattttaggagggtggatcagtctggggcaggtgcagtggagctgcctggtagaccagcctctgcttccactcctccctcctccattagccccatgcttaccatgtaatgacttcctgctctttttcttcactcaacagccaagacaatgcaaactccagtgaacattcccgtgcctgtgctccggctgccccggggccctgatggcttcagccgtggctttgcccctgatggacgcagagcccccttgaggccagaggttcctgaaatccaggagtgtcccatagctcaagaatccctggaatcccaggagcagcgggcacgagccgcccttcgggagcgttacctccgcagcctgctggccatggtgggtcatcaggtgagcttcacgttgcacgagggtgtgcgtgtggccgcccactttggagccaccgacctggatgtggccaacttctacgtgtcacagctgcagactcccataggtgtgcaagcagaggcgctgctccgatgtagtgacattatttcatataccttcaagccataaagatattgtgttcacttttctgcttgaggctaaggcactgtatcccaggcctcccaatgttcccgagccaggaactctgggccccatggagttatgagctcccttggaattttgagccaagctttaagcaagtctggactcctgagacctcctgggtctagtcagtaaaattctgcaactctaggaattctaagatcccattggaaggaatgctctacctcacagaactctgaaccctacagaaatatgggcctgctgccatttcctgaagaccggggcatcggggtggggtgataaaggatacaacctgcacagggggaagttattaaagaggctgcaaagtccagccaccctgaagatactccccagtgctcccctcctgctaaagaaccagttaccccaggaaaattcgactcctgtttttctttaattaactataccgacggggatggagtcatctttaggggctggtagggtggttatccaagggctgaatccagtggagctgggccaagtacgacaggagtccagataaaggtgtaggggctgcacggccgcaagtctcctggaaaggctggagtgaccggcatgccgggattgggagattaggatttgatttcattttggggcgggcggtggctcgtgctgggtcacgtggtcgtgcccaagcgctcctcctgttgccccacctgtggttgctgtggactgcacacgacagcagattcgctgtcccctcgttggaggcgaatggtcggaccccgagtggcggcgcccctgataaaaggccgaggattcgcgatcagggtgcaacttcactccctcctcttttctctccagccttgcagcgtggccgttcacatcacgcgcttcactaagcctcctatcactagtaacctttcagcgcattgtttaaaaagaaagcagtttctgtccctttctgtagttcctttaagttcaggatgtaagcgaagccttccattaagtaaaggtgagtgtcgtttcgtctcagtcgcgaaagtgcggcggccgatgatgaaccgcgccaggagcagcctcagcggccatcagtccattcgcagcgccggctccgccgaggcccggacttagctctcgagttgccttggcgacgacgcagctcgctccgccccagttcccttttatggtttcagccccgcctcctctagttagccgggtgcgcttcggcaagcgtggcgaaagtgcggcggcgaatgtcaagcgttgggtctgagcctaggggtgtggcttgagctcacgctggttctttcttgcctcggtgatccaccagccttgtcacccaggatttaggttggcagattcgtctctcgcctttggaatttctaccttctcctaggttttgttttttaaaatcaggcctatgataccgctcatgggctcatatttattttagcattgtaatttaagttgtattttatgcaactctaccccgatacagagagctgttgatgtaactgcagcgagcaaatggaggactagagactagcgaaggggccgagacttcgtctccagagtatccctgtcagcatccatcaactgcactcatatattgaatgcagctcctatccgcctttcttttcgacttcttcatgccgttaccactcttcatcagttagtctagcctcaatgttttcatttatttcctttgttttttttgggggggggggaacggagtcttgctctgtcgcccaggctggagtgcagtggcacgatctcggctcactaaaagctccgcctcccgggttcacaccattctcgtgcctc[224 bp omitted]caggtcggagtgcaggggcgcgatcatagctcagtgcagcctcaacctaccgggctcaagcgatcttcccacctcccaagtagctggaactacaggctcctgtaaccagaccctgctaatttttaaattttttgtaaagacggggccttgctatgttgcccaggctggtctcgaactcctggactcaagcgatcttcccgcctcagccttccaaagtgctgggattataggcgtgtgccgccgcgccccgccaggtgttttcagttctatgcactccattccctgggctcttgacgaatgtgcgggagctgaatattcgttatttggactccggcaggaaggcgtgggctcagcttcgcgcttgcgcgctgctcttggagacggcgtctacttcgccccgcccctcatagtctgcagttccggctctgcagattcgctgctcacgtttcttttttccgtggcccttcctgccctttgtttctctcttcatgtcacccgcgggacaactctacgtgcaagtcgctgaaatcgattttctgcttcttatagtaagcggcgggctcgccagcctcgagcgaaagtgtgactgcgaacgggcaggcgcgcgcggggctcggcggaggcgcgcttgggctcccggcggcgacgactacgaccactaggagagcggacggaggcggcgcctgaagcggcggcggagcccatgccccgggacggcgggcggacccggagagacaaatccggggcccggggcatgtccccggggcccccgtgaggaggcggcggcggctatggagatcgcgccgcaggaggcgccgcccgtgccgggcgcggacggcgacattgaagaggccccagctgaggccgggtctcccagccccgcgtcgccccccgccgatgggcgcctcaaggctgcagccaagcgcgtcacattcccgtccgacgaggatatcgtgtctggagcagtggagcccaaagacccctggagacatggtagctaccgcgggtgaagcgggggcgggctcgagagggacccgggagtcgggagggatcggtgcagggcccggctcgaggtggcgttcaatagattgcacctaatggtgaataaggggacagtcgtcagtttagaaccgtagtctgttagaaagggggtggctatggagttgggaaggtgaaaagtatctggtttctgccgcaccccacccacccgagacaaagatggtgatcgttttagggtttaaaacgatgagcaattaaagaaagtttggtgttttgtcagatgtagagtgtggcagcctttgcgttcgtagttccaccagagaaggagagaaggagcagttgagaggaggagcgggtcaacactgggcctgaaagggcagttgaaagagtttgatgggtctatgggggtaaaaagaggttaagttgctggtctgcaagccttggggcaaggagtggtcgtgttggccactttcttggctggaaagagggagactataaacttggactgtggctatagaggacttggtaaaaaggagtcaagataaggtcccagaagaggagcagaggtggtggtcaatttgtggttgggtgagggagaaagaggcagtgtggtttttatgttttcttttttattgagacaaggtctcactacattgcccaggctggtctcggacttctgggttcaagctgtcctccctccttggcctcccagagtgttgggattacaggtgtgagccaccgccgcctgctgcaatgtggtattaagaagaaaagccaacgcctaccgccgcctcctcctccaaaaaaaagagaagcagaaggaaggctgtcagtcattcaggagcagaggatgtttgggacatggctacggaagggtcctcttgttccttcctgagaaagaattgggggatggccgggtgcattggctcaggcgtgtaatcccagcactttgggaggccaaggtgggtggatcacctgaggtcaggagtttaaaaccagcctggccaacatggggaaaccccgtctctactaaaaatacagaaattggccgggcatagtggtgcacacctgtaatcccatctactcaagaggctgaggcagggagaatcgtttgaacccgggaggtggaggttgcagtgagctaagatcacgacattgtactccagcctgggtgacaagagcaaaactccggctcaaagaaaaaaaaaaaaagaattgggggatgttatcaagtcagaaattggagttgctggccagtagcaggtgagagagatgaaaaagttggctacttgaagtgttgggagagagggccagcgcactggagagggtcaggtcagtgttggagctgaaaggagtgtgttggagccatagggctgggaaagtggaaagtcgcttgggacatgcagggcagtgttgagtccattttgtgctggagaagtctgtcagttctcctggggtggagcccatgaagtgagggatcagactggctgtggtggccgtggttctgtagaagctgatctgccggccctgggcaaggggagaaactattgccagtctgtggacaatggaggaattggtggctttgatgtgagggtgggaaacatggtaactggaaactgaacacacagggagtccatcatgaatgacagtttggctacttattataattttttagacggagtctccctctgtcgcccaggccaattctcctgcctcagcctcctcagtatctgggattacaggcacctgtcatcacacctggctaaaaatgtttgtatttttagtagagttgggggtttcaccatgttggccaggctggtctcgaactcccgacctcaggtgatctgcccacttaagccttccaaagtgctgggattaccggcatgagccaccgtgcccggctggctagttattcttaaagaggcagtggttaaattaagacttttgggccggacgccatggttcatgcctgcaaccccagcactttgtcaggccaaggtgggcagatcacctgagcccaggagttcaagaccagcttgggcaacaaggtgaaaccgcgtctctgcaaaatatacgaaaattagccaggtgtggtggtgcacgcctgtagtcccagcaactcaggaggctgaagtgggaggatcatttgagcccaggaggtcgatagtgcagtgaactgtgattgcgccactgaactccagcttgggtgacagagacccggtcttaaaaaaaaaaaaaaaaaaaagagttttggcactaggagccagccaagtccttgggctctaggccccagggataggtggttagtttgggacccgggcacagtcagaatgccccctggctattgcgtgatatccagtccagagcaggaaggggaaagacctggagaggcagagcagggtgtttcaagagcagaggctccaggtcagatcctttgagacctcgggctggttacctaactcctgagcctcagtcttcccatctgtgaagtaggtggcaatactcttgccacggaatttaggagaggactggatgaagtcacatatggaaaggaattggccagggtgagtgttctcgatggcagtcattgttattaagacagtgttggtcatcttgggctggtgtggaggagttcatgcatggggtggggcctggatgtggctgcttcagaggcttccaggagaggggagagatggcagtcaatgcgtgggcctggagtgaggtgcgagggggaagatggtcagtttgtgggctgaagggtcaggggtgagggcagcaagagagtctggcacagattgggctttggggggtaaagtttctggtctgcagattcccagaacaggtttggctttcattcagtaagccacttttcctctccaagcctctgtttctttctctgcaaatggaggtgctaatttttaccatggggtagttgtgaagatgaagtaagatagtcctcataaatttctgccacataaatagcagctgtcatccaggcagatttgttttttgtttgtttgtttgttttcacgtgcagtcttgaagaggcagtgaaagaactggagaggcagaaggctatctgtcaagaaaagaggggcagttggagcctggctgggaggagtttagaggaggggtgccggttggtctgtcctgggtaaggggtagagtgggtaacactctccaggctgggggagtctctcattccagcggttgagagaggggcagtaaggtctggttgggactcacactctcgaggagtccgtgcgtctgagctgcagaggtgatgacatggactggactggaagaattggtccatcctgtttgggaagagggcttgaggagttggcttggcagtgaggagttggatgatcttgggcctgggcaggggaggggtcattggtgaagttggtgagtttggacaaagggatttgcaggacagaaaacccaagggcctgggaacagcaaggagcaggggttaggctccatgctggggaggacgatggagtggttcactggccatggggctgtgggaggtggagggttcgccagggtgaagaggaatcgtggtacagaaagtgggtctaaggggaggcccaagtgagaggcccagagggtctggggctggaggactgcagggaggggttgcttggtcttggaacagaggtaggagatttgttggcatcaatctcataagctgtggggagggacagggggtgtcatttgagctgtggatctagtggaagggtggcgtgaccccaaggccaaggggtaacagaagagctgacaggtctgaaggggggagactcagttatccggaagctgttgtgccgtgctagagatggagcgctgcctaggccaggggatggaggagcgcccctgggtgaggaggaagcagcactgggggcaccccagtgcaggggtctccttcagcagagcctcacccctggggctacagtggtggcccagctgggtgggagctgtggggggtgtctacctgagggtgagcgctccctcaggccctgcaggggcccagggtttggggattcctggagatgaggtgatctggaggagggggattgtgagggagggtctcgagcctgcccaggcttatccggattcccatctcccacagtggggttccgcctgctggggctgctgtttcctcattacgtgaatggccatctgatgttcttctgttgtgtgcttgttttcttggtggtggtctctctcccgcgctggaatgggagagcagaggccgaagtccatcctcttctccgctttcctcaaggacactcagttgttgaatgagcgcctgtgggcccgtgaggcctggtggtgtctgagagccacctagcagagtgacatgtagctgaatgtcaggggcctgagcagcctggcgtggggatgccagtggggcagcagtgtgctctgtggcctctggcaagcatgggttcttgcagagcattgtgtttcctcacctgtgaaacagggccagtgatccctgccctgcagaccaccaggatgtcagaggatagggtgaacctgctgggggcaggtctcctcagcaagccacagccaggtgtgtgtagatgggcagggaagctcggggaggaggcaggctgggaatcgtgagtgaaagaggccgcttcagcactgccaggctgggcacgtgggtgcccgtggggagcgagctagccggctgcactgcaccccatcatgttgtggcagacccttcagctcttctgaaggccaaggccagacttacacaaggaacccatcaggccaaactgcaggaatgacctgaggctcggctggtctcctcagtcccagctgaactctgtggggttggaaagataggcatgtgagagggacttgtgatgagagcacatgacaccagccacagtccgggagactcatctcccctcctccagtcctgccggtgactcactccctgctccctgaccatcagtcctccagtgtgtgtgcgttgggggtttgcccactaggaagctacttgcatgaagtcaaggtgtctgcagggcagggtgagggggcccaagcatgctaccatctctggccacctgagctttggaaggcagcgggaggggtgggggcagggtgttcttaaatgcggatcttagggcatggaaatgccatactgttggctattgaaacccgtgctgcagattcagtcctaaaagcaggctggacaggtagacatgcatctgtcagtggtggaaagaggccccaggttagagaatcggcttgcttcagcattcgtggtggagctgctggggagtagggaacagggtcgaggcgggtgctttgatgcatctgctcagatttccgtctgggcccagctccacctcctgctgctggagttggcaagtagaccctgccactgagcagccacgtgactttggcgattgttctctctgcctcgatttttctgtgtctaaaatgcagcagtatgtcctcatagggtgattgggaggattaagtgagataacacagtgcctgatccatagtaaatgcccagcaaatgcctcccttgttattcctgtcatcaccactcctctgcccccacctatagccctaacattttgtttctgtttcctgcccgtgttgtgtatttgtactcctctttcccctatagtgtcccacgtcagcgtccctgctttccctcagaggcccactcctccaggctgggtgccccagcagtccctgacctccaggcctgactctgtctctgccaagctgtgtgaccgtggacaatttgtccaatctctctgagctaaaactaaatcagcctgtctcagcccactagtagaagaggcagcaggggtaccaagattccacactggccatgttagttccagcttctgcctactctggctgatgactttggacaagttgcagctcctccctgagcctgagtctcctctggagcgggggctccaccaccccagccccctgccctgttggagcatgatcaggttagtggtggtattgtgctggtgcctgtcctctgccctcccaggccctttgcacactgtgactcgccgctctccgtgcctgtacatgcagttgggccgcctgattctttgtgcctgtgattatctgtgctcgcatctatttcccccttcaagggcaaagactgtgtatgagtcacctctgtgaccctagtctagcacacaggagggctcgggcacgggacacatgtccgaaggactggggtgttttcctgggatcaaacaccccatggtgggatttacaggaaactttttttgtggtagttaatccagttggtgccaggacgaggactctttctcagggacctacagacaggctttagcacccattctgactcccggaagagcacgcgaagctggcccccagctggcactcggtaaccagccttcagtgcgtcagcgggagtgcgtgtgcacttgtttctgggagcgagtactggggctctgcgaaccttcacaggcatccgactccaagaggattaagaaccgtggggccaaatgccctgtgttggacggactgcagctggagcagtcactgagcacggaggccagaaacctgtttttacaaaagctccccaggtggttctgacaacctcgcttggctgtctgtgtgctttgctccgccatccatcactcagtcccaagcctgccttcagacctcagttcaggggtggctggcattgacctcaaagccttttttggagcaaattaacaggtgagcattgaaatactgcagaaattcaagctgagccggccacctgctgcagtagggcatgggggcaggtgggttaaattcttgccttctggctgaccttagtcatcaccagtcattgccttccatgtgcctgtaccaggcactggtctcagtgccttttgtgtattatcgcatttagatatcacagccaccccaggaggtaggtgccgtttgccccaatttgtagatgaggaaatggagcccatagaggtaaagtaattttcctgaggtcacacagtgggtaagtggtggagctgggattcaaatccaggcagccagcctggcgccgaagcctgcgcagtaataacccctgtgcggcggctgagtgcttggacgcattcggtgcaacgtgccatacggtctcttcatctataacccagaatcgtttataaaatagaggcaacagtgctggctttgcggtgttgtggcagggaggagaaacagaaacaggtggggtaagggcccagccttggtgggcacgcaggagggggtcactgtggttcgtggacagcttgagtccctggagatttgtgctgctcctctgtcctcagcattgcctgctgttctgacccttggcctctgggacgtgttcttcctgtgctactcagtgtctggtatgtgataggcgctcaatatattcttgctgcgtgagtgacttggtgaccccgtaaccagtcatgcattcagcatggtgtggccgtgccacgtgttacgagtcagggcagaagacaggcccagtccatgcttctgtgggggtcacagtcaagtgagggagacacacagtaaagaattctcagcaaaccaggcttctgaggactcagattagggagggtccacagggtgtgcaggagggcagggcagaggcagcttcctagaaaggacgtcaccaaggaaatccagcagtaagccaggtgaggagcagtgggaggagtgcaccaggggtggaaggcagagagaaccagcctggtatgtctgaagaacagaaaaaagccagacttagttgaggtagaggcaggctggtcagaggtgaggctggaggaggcaggagagactgctgtgtggggccttatgggctgtgctagcagggagccccagagggcttaagaaggggcctgggctgggcatggggggctcacgcctgtcatcccagcacttcaggagctccaggcgggaagatcacttaagcccaggagtttaagaccagccttggcaacatgacgagaccttgtctctacaaaaaatacaaaaatcagccgggcatggtggcatgtgcctatagtcccagctactcaggaggctgaggtggaaggatcacttgagtccaggaggtcgaggctttagtgagctgtgatcacaccactgccctccagcctatgtgacagagtgagaccctgtctcaaaagaaaaaggaggggcatggtgggtgtttttaacagaatcctgtgtggaggtgacatgaatagggtgagactgagacagggaggccagggaggggccgtgagccaggagcccggaggctgtaggcttggcgtagcctcatattggctgatagctgacacttgacttcattgacttcttcatcagattcctctgagtcctcccctccaccagcaggtttgccgatgccactgtttcccatagcacctctgaggtgactgttattccccttcccttctctccttggatctgagtcccttccctcgtgctcccccagccagcgtgtccttggcctgcttgggacatcctgcccctgcatgggctgtgggaggcgtgtgggctgtgaagtccggtgacctctccagtgacttcacctccacagtcccttcaggtctcacagtacccagatccagaaaactctacagaccatcccaaacccctctggtggcttagcgcaatatcggtgtctgatcagtcttataaaatccagaaaattctgattctaaaacacgtctggcccaagggttccaggaggagactctggagcccgcagcgggcctcgttccatgtttgtgaaatggcagtaacctgagaggcagcacgggagccccctgggtgccagtcccagctctgcccttgggcaaatcacccagcttctttgcctcagtgtccccatttgtatggggattgaggattaaattagcctctacttggaaagcagctggaacagtagctggctgttgcaggcgctcatgaggacatgggaaagttgagtgaggtggtcactgccttgaacttgactggttcctgcctcccccggctgtaagggttaggcaggtggggctagatgaccagcgggtaggatcatctgcctgagtgtgatttcggctcctccacacttgggctgtgtggccttgggcaagtcccttgacctccctggaccactttccccatttgtgaagccattttgccagatgaggactctctcaaagtttttagactctctgggaagaccagagagccaggcctggggcccacgccagcaggagcacaccctgcatcaagtgtggagctgatgccgctcctgttacatagccgccacagcacctccagggctgagcccacgtcaggctcctgggctggagccacacaggaggctggggtctgctgtttcagctaagaggaggtgggagatgtggaggggcttccctaattgcaagaaggtggttcagaggctgggtgccaaaaggaattcgagagatccgtcatgcttggctatgtttcgtacattaagtaggaaggtccatgaaggcaggacccatctttgtcttggctcacctgtgtccccagcaccctccatggtgcctggccctccgcagggtctcacactggatgaattggtggtggatggaggtacacagtaggcactcagaagttgttctcaccccttcccttcctctaggcagctggtactgagcggttgcctcaaggtgggggtggaggtttggaagtgtctgctgacatccgcacagctcatgtgacttgcccagcgcccatctcacttcgcagcggaagcctgggtcgggagccctgcagtcggatgctcccctcagggctggttgggttccagctgggaatgtgttccctggttaggtgggcgggctcctctagcaagctggcgcttgggacccgccggggtcggactcgtgtgccaccttcacacccacccctccctctctccacggtctccgaggctctcaccagctgctgtcagcgatgtagtggagaactgctcgcgtcctgtgcagtcttcccttttgcaaagcaaagcactgtcacagctgaactcgcttggttccccaggacaacagggagggagggtgggagagtggggctgccaaaaggtgaaagcgagccgcagggaagtgactctctgcaggggtcatgcctcctggtggtggtgatggaggtgatggtactcaaagctcccatttatggagcgcttaacagggctaagctctttacatgcatcgttaatcttggaggaggaaacaggctcacagaggtgccaaggccacacaggtagtagaggaggagctgagttatagcccggcagcttgaatggttctgatcctctgtcctgtttcagaaagcccccagggctccactgtaactacaggacaaagtccacacccgtgggcctggtgtgggaggcctttcccacagaacgcccagcctcctagacacaggcgcctctgcctagcacgcccctcgctagtcccctgcccttcctgaccaattcccgttacccctcccacgcctagacgcaggcgcctttgcccagcacacccctcgatagtcccctgcccttcctgaccaactccccctcccgtgctgccttctgggcaaggccttctctaatccccggacaaagctctgctccgctcgtctgggttcccatggcgcctcctcgctctgttgttatttgttcgggcccatctcccctccctggaccagtgctgcagagggctgcatcctgtccatctggctcctgggaggggtggaaccactgaacgcctccaggaaccttaaggactccgggcaaagtggggttgcttatgagcacccaggccgggtgccgcaaagcctttgtaacccaggcactggggctcaggacagtcagggagcatggggtgtggggaaggaagatttcgttcactgagtccttttttcctgcattcattccttcattccttgccaaccagcgcctgttttgcctccactttgctgtccctgccatgccaggtggaggggcctcccaatggctctcctgctccctctccaacccgctccccacctagcagccacagcattcttgaaaaagcagactttgctattcctgtttcacatcacacttgtgacctccctgctgcctttccctctgatctagtgtccctgcaacaggttaggaagcccaggtataacctggctcttgccaccatcgccggccacgaccgagatcaccttgccatgctcttgctgggttcaagccatcgtggcttcctttcagtcctagaacacgcaggcagctccccacatcctgtcctggaagaccggccccacctacgcacacaggtggctctcactaatctttcaggtgccagcaaacccttccttcctggccctcctaatgggctccccgtcaggtggccagcgatctgcttatctgcgggcctgctgatactcttgccctggactggaagcatcactaggcagtggtgggttgggtttggtgccactgtattccccagtgccccagaccacgtggcactgggcctggctctgggcaggagcgcaatatggcaggtggagaaggaagtggcatgcaatgctgggtcttagtccttgccatgagcagctcagacagtccctaccctagcatagtccctggtccagaaaaggaagtgggcagagaggaggaggagctttagggaggggagtacaaagcctgcctctggtatccccccgccagcctggtgagaatggcagcgcaggactggcaaacaggcccgtctttgctgttgacttgctgggggtcataggccaggatgcttgccctctctgtggggcaggatggtgcccggggtcctttcccactgcgcgtcagtgtttcccatctctccatgtaggacaccgcaccatttagggagtgattggatcccaggacctcctccctgtcacggggtggcaggcaaggttctgataattgatctgccgtgtacctttgtggcaggtgacctaattccccattccctgtgacccatgtgtcacaggtgtcaggggcgaccggccacccagccaagcttccatgactccgttctcactctgtgttctgtaatccccttctgtcacgggcttgggatccttgattcccggcccggttctgcctactatgatcacaatgaacagtcagtgttccgtttccctggagggctgccttccttgctgtgcctggacctgtgttccctgctggacaagtcccagggggtcaggcccggggctttctcggtccctgctgtgtctcctgcacagctccaggcacagagcaggtgttcagtaaatgttgttccattaaaatggagttggggctgttgctggcagagcccagggacagcgccctcatggagcctggcttagagtgcccaagtctgacagtggcctgatcctgtctggtcctggggtggagcagacaccaacaggcggggccatctgactgaatgtcctcccaccagctgttaggtccaggtgtttgtgcttactgccttccagtgcagtcaaaagaatccagggctggcaccagccccttcctcatctcaggggtagaggggtaaccagagaggggcggcacttacccaaggatgccctggcacttgggtccaggctcctgctgctctcctcggccacccctccagctgttttgtttttgtttttgttttttttttgagatggagtttcgctcttgttgcccaggctggagtacagtggcaggatcttggcttactgaaacctttgcctcccaagtttaagcgattctcctgcctcagcctcccaagtagctgggattataggcatgcgccaccatgcccagctaatttttttgtatttttagtagagacagggtttcaccatgttggctgggctgatctcgaactcctgacctcaaatgatccacccgcctcggcctcccaaagctctgggattacaggcgtgagccgccgcgcctggcctgtttgttttgagatgaggtcttcctctgtcgcccaggctggagtgcagtagtgcaatcctagctcactgcagcctccacctcccaggctcaagtgatcctcttgcctcagcctccagattagctagaaccacaggcacaagccaccatgcctggctgattttcttatttttaattgttttgtagagatggatttgcaccgggttgctcaggcttcgttgtgcttttgatttgcatttccttatggctaatgatgttgagcatctttttttttttttttttttttttttttgagatggagtctcgctctgtcacccaggctggagtgcagtggcgtgatctcggctcactgcacgctccgcctcccaggttcacgccattctcctgcctcagcctcccaagttgctgagactacaggcgcccgccaccatgcccggctaattttttgtgtttttagtagagacgggatttcaccatgttagccaggatggtctcaatctcctgaactcgtgatccgcccaccttggcctcccaaagtgctgggattagaggcatgagccaccgtgcccagctgatgttgagcatctttttatgtgcttgctgaacacttgtgtatcttctttggagaaatgtctttttagttcttttgcccatttttaaattgagccagccgggcacagtgattcatgcctataatcccagcactttgggaggccgaagagttcgcgaccagcctgggcaacatagcaagacccagtctctattaaaaaaaaggggagccaggcgcagtggctcacaattgtaatcccagcactttgggaagccaaggtgggcagatcatttgagcccaggagttcgagaccagcctggacgacatggtgagaccccatctctataaaaaaatgtaaaaaattaaccaagcctggtggctcatgcctgtagtcccagctacctgggaggctaatgtgggaggattgcttgagcccaggaggtcgaggctgcaatgagctgtggtcttgccattggactccagcctaggtgagactctgtctcaaaaataaataaaaaataagtaaatgaattgtttgtcccttcattattgagttgtgagagttctatatacgtgtatcccggatgcaggacttctcagctgagcgatttgcaccacctgggatgttttcagcgtgtaatgccagtgcatttccttcccgtctcttctctctggctagattcacagccaccgctagataaaaataaagctgtgaggatactgtagatacagttgaatatcctgcttctgcacttcatttttccgtttttttagaaagcatgatttaaagtacatcactgggctgttgtaattcattctagccatttccgcattgctgagcgtttaggtcctttccagttttcagttgcatagataatgcagtgatgttcgtccttgtccataaatcttcatgctcatcacacgggtagccttcttagaaaaaattcttagaaggtgattttaccaggtcaaagggaaggaacattggaagtctcagatactggctgtgcccacattggacagtgagtgttgagggctagggttctgtcgtcatagtcaccactgtagctttagatttttttctgagagagggtctctctctttttttctgcttttgaggtttaaaccatggccagagacagggtctcgatctgtccctcaagctggagtgcagtggcgtgatcttggctgactgcaaactccacctcctaggctcaagccattctcctgccttagcctcccgagtagctgggattataggcgcgcaccaccacgcccggctaattttcgtatttttagtagagacggggtttcactgttggccaggctggtctcaaactcctgatctcaggtgatctgcctgcctcagcatcccaaagtgctggaattgcaggcgtgagtcactgcacctgaccagattttttttttaatgattgaatgaatagtatttgcatgtgggtgccttgatgttaagatggtgtcttgttttagcgagcgttcttttgactactagttaacttcggttttgtttgtttgttttgtatttttgtgggtttttttttttttttaatggagtttcactcttgttgcccaggctggagtgcaatggcgcgatctcaggtcatcacaacttccgcctcccaggttcaagcgattctcctgccacagcctcccgagtagctgggattacaggcatgcaccaccacacccggctaattttgtatgttttgtagagacaggatttctccatgttggtcaggctggtctgtaactcccgacctcaggtgatccacgcgccttggcctcccaaagtctgggatgacaggcgtgaactaccgtgcctggtcttttttgttttttgtagagatgaggtctcgctatgttgcccaggatggtctcgaactcctggcctcaagtgatcctcctgtcttggcctcccaaagtgctgggattacaggcatgagccactgcgcccgacctaacctgtttattgttaacatgttacatggttctgggaattggttcttcatgccctttgcctatttttattttgggacctttataaggactcctctattgaagatagatgtaattttattgtgcagatatatttgtcctcatttatcatttgccttgcaggaaaggtgggggacaggggtgcaggacactaaagagaagcactttctcctctgctatttcaccgagtcatcatagcaaagccccatctcagtgtgaacagcttgggatggagaaacacagggctggggccctcagagagggcagaggaggcagtggcagcccaggccttggaggccctgcagtgtaggagagagggtgctttagtggaggcccggcctgggaaaagggttagcaggttacagagggtccactgtaaccacaactccagccccatttgctgagcaccaggctgagtgactcggtgaacctgctggtgccccacatttttgcagataagaaactgctacttggggtcattggtcacttgctgaagatggcagaagccagggcagccctgcctgggtccctggacacatccagcccaccacagctatggaggctcagcaagtcccaggagcctcaagtttcagcaggagcctggactccctcgtctcccacagccatggccaccacgtcatcagcaccctctgtatgagggtcctgtatgtcatgtgctgtttccttccagtagcttcctgactcttcaggaatactgttctttgccctgaggatctgtcgcccacctgcatctgcagcctcagctctgctccccctctgccctgttggagggtcctcagaaccgactcttccctctgtctggaaggatggcctggacttttgtgtggctcctgttggcttatggcctcctgtccccatccagtgtaagcttcttgagatgggatgtctggcttttttgttcaccagtgtagcctggcacctagaatagtgcctggcatagaatagacaacaataaatatttgaaggaattaatgaattccctttttcttttttttttttttgttgagacagagtcttgctctgtctcccaggttgcagtgctgtggcgtggtcatggctcactgcagtctagatctcctgggcccaggtgatcctcccgcctcagccttctgagtagctgggaccacaggcacgtaccactacacctggctaatttttggattttttgtagagacggggtttccctgtgttgcccaggctagtcttaaattcctgggctcaagtgatcctcctgccttggcctccgagagtgctgggattacagccatgagccattgcacctggccacatttcttacttttactcatcttttaggtctcagtcgaaatgttcttttctcttatgggtcttttctaactattcctccaaatctgaatttgtatcccctgtgttttcccctataatatgcattttcttcttataactggtaaatttttgggtgatttgtttgccttcctcccagtccttgagggcagggaccagccctgttttgttcacggctgtctgcctagcccaggttgttgcataaagaatgaatgaatgaaaatatgttcattagttcccaaacagacctctgagggttggtggcattaccctcttgttatgaaggaggaaggtgagggtgggcagtaagaaattccaagcacctggtttccatcactggagcctttgctggaccagtaaacagcttacagtttctaaaattccaatctaaagcactcccaaagcttctgaattcagatggccatctggtacccatgaccagaagcctgaggcaggtggcccgaaatagcctgcctggttctggcaggactgaatgtctaccgatgagtgctgggctttcctcagaggccccctttcccgagcctggccctgtcacctactgaggacttgggtgggtggcagtgctaggaagcattgagccactaaatgactcagcaaacccttgtcaagcacctcggtgcccccagctctgctgagtcctctgccggattgtcttgcctgtatgctcatttgaccctgacagtgatcttcagttccccaaggctccaagagctctgtctcctctgagcctttgcacatgctgttctgtctgttgcaacactcttctccctcccttctgctttttaattattattattattattattattatttttaattgagacagagtcttactctgtcacccaggctggagtgcagtggtgcaatctcggctcaccacaacttctgcctcccgggttcaagcaattctccagccacagcctcctgagtagctgggattacaagtgcgcaccaccacacccagctaacttttgtatttttttagtagagacaaggttttgccttgttggccaggctggtctcgaatcccgacctcaggtgatccgcctgcctcgatctcccaaagtactgggattacaggcatgggccaccttgcccagcccatttatcttcttggcatatggaatatgtatgtaatgtacatgtaagttgttgaagtgtaatatgttgaagacctgtgagcctccctcctaatttcagagtgagaacattgccattaactcacctctgcctgtgggtgggtggagggagcccactgtcctgactgttgtcattgtcattctgtgttttttattttttgcggggggcgggggtggatgggtgagggacaggtgtgtcaggttcaataaaaagggaaagggtcatcaggtggcctttttaaaagttttatcaaccatgtctgcatgctgaaaagcatggtgtttcgttctgcctgtttttgagtttcataaacatggtattgtgaggaaattcctgggtcttggtttttcttttctttctttttttttttcttttgagacagtctcgctctgtcgtccaggctggagtgcagtggcataatcttggctcactacaacctctgcatcctgaattcaggcgattctcctgcctcagcctcccaaatcccagctgggattacaggctcctgccaccacacctggctaacttttttgtatttttagtagagacagggtttcaccatgtctgtcaggctggtcttggaactcctgacctcaagtgatccgcccgcctctgcctcccaaagtgttgggattacaggcatggattccttctgatacatttcacctggagtgctgggatgacaggcgtgggattaccttctgatacatttcacctggggcgtgagcaagactttcgctagagtctggagctaggaacagaatggctggtcatagttgatgagtacatttggcttctcaaggtaatgccaatctttctgaagtggctctcgccaccttttacctgactgactcctgcttgttctccaagagtctccttcctggctgtctttccttcagcacctacttaggggagcagcagctgtgtgcctagtgtagttatgttctggggggcaatgcgaacaagactcacagtccctgccctctagtggccagtggtgttagatggtccctctttcaggacgcccccaaccccaagtctgggttaggggtttcctttgccccagctctacctactctggcttgtcactgtctagggatgggtctgccttcccgactggaccaggactcctgtgtggacagagaccaggattagggttgtcttggacgctgtttccagcatgaccctgcccggggcacagagcaggtgctgggtgaagcaggtgctgggtgaagcaggtactgttgagcttgaggcagttggggtcaagaggaagaaatggattctagtatccaggactttctggagtaggacctggaccccaaggccatgtaagcccaaagcctcatactttccctaatgcctgagtgttcaagattcctttacctgtgctgggctctgtggcagagggaggggtcacagctcctgccctcgacagcttagagaagagtcagtgcctaactacacaccccttccatagtgtgcagggctggggatgtgcggctggcagggtcctcacagagaaatgtgaagcccacccggccctctgggagctcaagtgttggcatgtcttttctgaagagggtgagggcaggaagatgtgcattacccttagaaaaaaagtagaaaaggccagccttctcatgcagtgccagagcagttagggctgtatgggggccactgtgggcctgtagattcgtaacaggaatcataatagctagcgttggtggaacacccactgggtgccacgcatggcgttgagccctccgtgcatcagctggttttatcccatccatatcccacgaggtaggtggaattgctgccccattttaccaatgaaggagagatccagctcctcacagctagtcagtggcaaatctgaacttcactcctggcagccagagcccagcccctgccctgcacgatggtagcagagcctgtctgcaggcaccaggcattcagagagctttacctcctgtcctcttgactcttcatggcaaagctggaaatggggagactgaggaacagagttacttggccccagtgctgcctctgatttgaggaggcagggtcagccctgggccatcgctgcctttgtccctgagtctgcgttcccctccactccgtgagctcactcagagagttctctccgccccctcaccactcttggtgattatttatccccaggtcttcacttcggcaccatcaggtgcccagccctgggtaaatatttgtctcagggcagacaggagtgggtgtggtcagcgtttcagagcccgggggcaggtggaggcagcaggtggggtggtgactgggggcccctggctggagctggtggctctgcttgctctttgctcatccagcatccactctcccgggggctgctgaggcgttggcctctgcaataacaggggcttccgtttgccacgcgccagccccacactagacgctttacacaagagagttcagtggctgcttttagaagtctttgtgtgtcagtctcagtctcattggctccattttgcagatgaggagactcagccatgaagggtcgagagccattgcctgtgtcaactggggtctgttgagttatcagggccagaatccacctggggccacaggaggtgaatgagggtgttcattggatggaggccaggctttgcctgttcccaggggtcctgaaagctggcaggaaccaggtctgccacctgctctctggaacacatgcactccttgttcctctttctctcttcagaacgtcttccactaggctggccatgggccacacaagcccagccctcctggtgtctggaacaggaccacccagtccagccccctgacccgggcagctcatgcaggcttagctaggaccccacatcctccctgtcaaatgggcgatagagggccagcccacgcttgttggggtggagggcagtttttagaggaggctctgcagacaccccaaataggcacccccaaatacaaggtctgactgcaaaggccatgccctcactaggttgctgttacatgtgtttagaaggtgcattcacaggctgggcatagtggctcacacctataattccagcactttgggaggccgaggcaggaggatcacttgaggccaggagttcaagaccaccctgggcaacaagtgagacccccccccccatctccacaaaatataaaaaattaaattttcggaaggtgcattcacatcacaaggcagaaagtcactagtgtcctcagatgtgtacatccctttgggaagctccttccagctggggggcttatggaggccataaaggaaccccctaactccccctacacatcccagcagaaagccctgggctaggggacagtcttgggcccttgtgttctgagagtgttattagtctccaccacaggattggctgtgttttcttagtggttcaggcatgcattcagcgagtattgagctcagtgcccagtcctgtactggggacacagcagtggcaaggcaagcccggccctgccttccaggcttattgtccagagagagggaagtgtgggaaacaagttggccaaccagcagacagcaccactgcagattgagagaagggtctggaaggaaataaaccaaggctggaacagaggagacagtggcgaggctggtgggtaggtacctggcttgggtcaggatattgaacgccttaaactcttgggtgaggcatggggtccaccaaccagatgaagtgggctttgaagtcaggcctacctgtgctgtgtgtccttggcacatgctccatctccctgcgcctcagtttcctcctttggaaaggatgggggagggatagctgtaccccaaaccgtggcatgaacagaaaggtcaagggtttggctaagagtgaggattgtggagccatagactgctcaggctcgaatcccggctctgacttttactgattctgtggcctcagtttccccatttgaaatggggataataaaccctacctatcttagggttgttgaagacagtaaatgaggtagtatatgtaagtgcttgccattgctcgta[138 bp omitted]ctctgctaaaaatacaaaattagcctggtgtggtggcgggtgcctataatcccacctactcgggaggctgagggaggagaattgcgtgaacccaggaagcggaagttgcagtgagctgagattgtgccactgcactccagcctgggtgacaagagtgagactctgtctcaaaaaaaaaaaaaaagttgtgtgtcacatggggggactcgggtgcttagcacactgcttgactggggacccagggattaaggccttgacttccgctttcatccaagcctgccattgaccttacatgcagctgctgtgtgtgaggcgctgtggcatgagggaaggtgcgcccaatctgccttgttccttccgtcccaagagacttggaaagccatgagtgtgttctgaccgcatctgtttctgtaacaggatcttcagctgcggcaggcagttgggaaggtcaggacgaggggaagggaaggcaggcctgtggcacctgccatctgcgcccttcactggagtgggcaggccttgcccacatccctgcctgaggcctggggtctggaggcctggctccttgttggctatgtaagcctagcccgccccctggagctggccatcctgcagcatgtggccacggtacccactggctgaatggtggtgcctccctgccgggaagggcagagaagagcccctctcacccaggaaactgcaggactcacggcctctcagcaggcctgaggagggcacgggggtctgagagggaaggaccggccatcccagcctcccctgagcaggctaactttccaggacgcattgcgggctcccttccctccagcccgtggttctctggggagaagggaagggtggacgttgtcttcatttcccagagtgagtcggtgcattcgttcattcatagactcacagcgacagacaccacagtgacgtccctagactcagggagcccttggtctaggacagaaaacgagcaagtagatccttagagattgggacgtgtccagtgaggaggcagagtgttgtctgggtgtggtgtgggggatggggatgggggtgctgctacagaaaggggtcaggagaggcttctcagaggaggtgactttttttttttttttttttgagacagagtttcgctctttttgcccaggctggagtgcagtggcacgatcttggctcactgcagcctccatctcccagctcaagcgattctcctgtctcagcctcccaagtatctgggactacaggcacgtgtcaccacacccggctaatttttgtatttttagtagagatggggtttcaccatattggtcaggctggtctcgaactcctgacctcaagtgatgcacccgcctcagcctcccaaagtgctgggattacaggtgtgagccattgcgcctggccaggaggtgactttcgagttgagatctgaatggcaagtcagctgcggcttaagctgcaggaggggagggaagctgtcagagggagggaagagcagttgcagacccggaggcgggaacaaaccacaaagcctgtagagtggctgaggaggcgtgggcgagccgagggtgagccccggtggagtgctggcatcagggggccttgtcctgggctgaggagttgaggttttactctcagtgcagggacaggtggtgccgagtgaaagcctgtggcagcaaccagcccgctcctgcacggtctcctaagctaattgtgcgcctgctttgggtctgaatggcggggactgcacaggacgtgggttttccttctacggtgggaggtgatctcagggagtctccctgcaggtccccaccaggtcttctgtgtgcctaccatgggcatgcagttctgaagcgctgactggtggtgggaaacctagcctggagattgtcccagccatcccacccaaggcagggacaggccagtggggctacccgagcaaaggcttagggcagctggtagaccgggctgcaagaatgaggccgcagagttagtcttagagtagcacctggcaggaggctggctccgtaagccagtgctcgtccttggcattgttgactcagtggctcagctgatgagcccgaggctgctggggaaggtgtcctcctcagccttacagctccagcccccgcgtgatccgcgtttctcaggcctctgggttactgagaggctgttgggggtggaggtgcccagcggttgttcactgggaagaagaactcaccaccagcgtcccttcatttttcccaaggagtcacaggcagaggtttttccgaacaggctcagcagccagaagtccccgcctgggcttccaactgcctacagaggtagctgcagccctcccctcaggctggcctgtgtcactgccctattctatgtccaggcctcccggcacccagccgctgtccccatgagtgcccaggggagctcccagtttagcagggggagagggttccccagtgcagagtgggtgggaagcccggggcctgtgacctgtgtcacagggcatctgaggatgttgttcctggaaggcaagtgtgtggccacggagctgactttgggctctcatttaggaggctgactctgaaggtcatagtggctcagcagtgaaagaggaggatccccacagtgtgtggtctgtgtggtcactcagggatgtgacctttctgaccctcctcttctttgtcttgggttgggggtcccggccatatccccttcccagggatgtgctaaggtttcagggagctcgggtacataaagggcttgcctgagataactgcgtagtaaatgacagctgtcagtggactccctgccgaacgttgggacaccacagttacggacttgtgccaggagccccagcttcctgccacccctcaccgtgtacctcagagttctcctttgacaaccctccatctggctgtcctgtccctcaggggtgggcatgaggcccaagttccttccttcctttagcccacgttcactgagcacctgctggccgggccccagggagccacccaggtggctgcctccacagccgggctgggctttataactaattctgtcgtgagagactggccttggtgccagacctccctcccggcccacctgccgcctctgggttccttgtgggccaccgcctctgagcagctgctgcttttttttttttctcatttaactttttgttttgttttttggtttttgagacggagtctcattctctgtcactcatgctggagtgcagtggtgtgatctcactcactgcagcttccacctcctgggttcaagcgattctcctgccccagcctcccgagtagctgggattacaggcacgtgccacaacacccgtctaatttttttttttttttgagacagagtcttgctctctgtcacccaggctggagtgcagtgacacgatctcagctcactgcagcctctgcttcccaggttcaagcgattctcctgcctcagcctcctgagtagctgggattacaggcatgtgtcaccatacctggctaatttttgtattttgtagagatggggttttgccctgttggcccgactggtgtcgaactcctgacctcaggtgatctgcccaccttggcctcccaaagtgctgggatcacaggcatgagccacggtgcctggcccgtttaactgtgttttgatggacattttcagacacaagaaagtaggagtataatgagtctgatggaccgacccactttctggcttcagaattgatgactacatggccaatctgttcctgcctatctccatgccactctcacctgcattattttgcagcagctctaagatagctatcattttacctatacattgcttgtgaaacagtgggaacactcagccccaagccggcaccctctgtcctccactgtcatctgccccaggcccaggatcagaccactgggaaagtggccaggtagggctgtgtctcttgtggctctgcacacatgagaggtggtgggtgtggtgctcagagaagagccagctccaccccccagcaccccgcacaaccttgctgtttgaaggaggccgccgccccaggaggggctttaggggctgccaggaagcccggagaagggcctggggtccctctttgttcctggttcccggctgcttcactggctactccatctctgtgttcatttgcttttaaatgaggagcacagattt[136 bp omitted]gcctcccaagtagctgggactacaggtgcccgccaccacgcctgactaatgttttgtatttttagtagagacaaggtttcactgtgttagccaggatggtctcgatctcctgaccttgtgatccgcccaccttagcctcccaaagtgctgggattagaggcgtgagccaccgcacccggctttccccacttcttgcataaagggtagcattcatgagcataccgttctgcaccttgcttttttcatttgtgtcttgaaacctgttccctgttggctaagagagcgcacactcattctctgtggcggcagggctccactgcgtggatgaactctggggagctagccggtccctgctggtggatattgtggttggttccggttctgcattcacaagctgctgcagtgactgtccttacatgtatgatttttcatctttgcaagtatgtctgtaggattaatctccaggtgtgtaattgctaatcaaagggtatatgcatgttacttttttttgagatggagtcttgctctgttgcccaggctggagtgcagtggcgctgtctcattgcaacatccgcctcccaggttcaagcgattctcctcccaagtagctgggattataggcacccgctaccacacctggctaatttttgtatttttagtagagacgggggtttcaccatgttggccaggctggtctccaactcctgacctcaggtgatccacctgcctcagccttggcctctcaaagtgttgggattacaggcgtgacccactgtgccccgcacatttgtacttttgactggtcttgccaaattgcctttgagacggaaccatgtccttggtcaggtcctttctcatctctaagcgtcccctggaaagttggggagataatttctatttctcagggccattaggaagtggaaacgagatcgagtttgtcaatcgcttagttttgggagtgggcgcaaagttacggctccaccggtaaagcacagtagaagggccccaagcagtgtttgttctcttcccccatgcctctctgctgagtgccactggggattgtaggagtggtgggagagcgtggggatgattactgttgggaaatgcatggcagtggctggaagagggggtcagaagcacagacctgcatttacactcacactctgggatgagggactttcctcctcagggcgtctgtctccctgccatgggaggcagtgcatgtgtcagccatggccctcggctgtaagcccagaaacagacccctgcagaatttgtagcaagggaatgtgtggggaggatgtcaccaggcaggaggacagctgggccctcgcatgggcgggattgaggccactggattccctaggtagggagctccccaaatacaggaagaaggttagaggcaggaagagccttttctacccaggaaacctgaccagtgccacgcagtgaatatacagggtcctcacgcaaggacctgagagatgtgtgggcagctgtgtgcagtgtatacagggagtccaggggctggtgtgagccctgctcttgaggggcctctggatgcccgcggtggggtgctggggcctccacgggcgtcattctgtggttgctccaggattggacttagaaatctgggtttgactacatatcaggctgccctggggcccctttcagtaaagatactcccctgagaaatacctgcccttgggaagcccactgcattgggcttacatgactgatcagactctgattctgtgtggagcagcctggggaagggcttggaggcgggagtgaggatggtctccacgtgggcagtgtagacgtgtggttttgcagggatagagacgtgcagcagcacatccgcagaggtagcgaggccttgggggtgtggggttcccacagaaagctctgtgggtactcttctgcctcctcctccctatttcaggccccaggaggccttgtgtggttctgtccctcccctgccccccaactgaggccgtggcattgtgggagcagaggacggaactggacacctagtgaaggtgcgtagaaggcatttgccccaggctggctctgggctgagcacacccattggtgacctcatcacgtgcacaccttcgctgcctgagtgcagggcacccaaaagcctgccatagacaagaagggaccttccctgagttcacccagctggccctgtctgagttggggactcacacctgtgctgactccagagacccaccccagccccaccttcctgttccttcagtcaacacatatttattgagcacttactgtgtgcccagtaaagacccttctggggatatttcagtgaacaaaaggggtaagagttctcccctcattatagcataaatgcacagatcagtacgcttcctgctgggtcatgagaagtgccacctagagaaggaagcagggattcatagtgataaaggggctgactttttggagggtggccagggaaggcctttgaggaggtgacttgggagtgaagacctgcaggcagggagggaaggagccgttggggtgtgaggaagaggggtgctctgggcagggggtaacaggtgcaaagaccctgaggcactgtgtccagatggctctgccactggcaaggatcaggacctcaatgactgtagcagcccctccccagcacccccaagtgaggtctggccatgcagctctcccatgtgcatgctttgcctcccgtgctccataagcaggaccttgacccctccagcctccttgctgacccctctcgtctcacactccaggtcccgatctgtgcagctcactgccagatgcatcaggcagcctcctgcacctgcactttcttcacaaagttccctctgccagagacgccttttgcatctttgtcatctctgagacttttccagatgcctcccgctgcagctgatcccagcctggccatcctccccgcctccatgtcccctccctccctccctccatcatagccttgatgctgttctgccactgcccctggatttgtctcactgattgtgcagaaggctctgggacagagctggcttgtgggggattgggccactgcctattggaggcatttgggggctgtcccaggggtgagtgcaccccaggctggaccaggtgcccacacctctcccgcccagcactggcacctgtgaagggcctctggaggctgggtcttcctgcaggcaccaggaagaaacctacgagcgcatccttgctgagggcaggacccgctctccacatcctggaaacccaacagagaaagacagtctctctggcagcctccctgtcttgaagttcgagaaggctgcatttctaggctcccacaacctgtctgtccggtttgaagccggggcctgagggcttcagggtactgatgcaggacagacagctctggttcaaacctccctctgtccgctcccacaggtgtggcctcagaagaccattccctctgtagcgtggtagaggctggaaattctactctgcaggattatgatgcggattaaatgcagtaatcgagtgtttggcagagtgcctggtagggaaggggttcagtaaagagctgctcgcaccattctgtgcagggaatgctttagggcatgttttagaattttagaacgtgtttcactacatgagtagcttcttgcagctttgaggccctggcatccctctcccctgcctgcaggcttccttgttcactgggccaagtccccgcagtaatcttcctaagcatggagtagaccgggcccttcctggccagaacatccccatctaccttcagggtctactgcagtggccagatgtgagcttctcctctgtccgctcactcaccttctctgtgcctgtcttggccccttctctgtgcctggctggccccatgtggagcaatgttggggtaacagtgtggaccacagaccaccccatgctgtcttcctaggactcatagtccagtgggggagacacacaggtctccagatggtgacaactcagaggggacagggctgagacggggagcccagagggtggggcctgacctaccgtggggatcagggagggcttcctggagaaggcatccctaagctgagaattgaagaagtagtaagcagtgagagcatgtaccgtgtaatgtgtaaaggggagggagaatgtgaggtgctgggaagcaccgggcccttcgggggacgggaagaatttgggtgtggccagagcacagtgccccatgagtggagaggtccagattgtctatttttcttttcttttttttcccccaatgatcctagaaattctcccaagagaggtccagattttttgacaaggctgaagggcggcccctgagacctgactctacctgtctgcctggcctttcctcagtccagtgcgtgcacggccccctcctcgctctcacgcatcatctgtgtgctccttccctgccagacaagaacccctggagggcagggaccagttcagagccatccctgtctccccagtgccagcacagagcttggcctgagtaggttttggggactgggcttggtggctcacacctgtaatcccaacattttgggaggctggggcaggaggatcacctgagcccaggagttcaagaccaacctgtacaacatactgagacccggtctctacataaaaaaagaaaaaaaaaaaaaactggccaagcatggtagggtgtgcctgtagtctcagctacttgggaggttgaggtgggagggtcacttgagcccaggagtgcaaggctgcagtgagctatgattgagccgctgaactccagcctgggtgacagatggggaccccccaaaaaataggttttgggaaatgtttaccagatgagaggcaagacggaattctcctaaattcgaagcttggaattctcctaaattcgaagcctgaggcagaatggttgaagcaaaaagaggagatttgttgtcttatgggtctgaagggtcctgaatagtgtggtgtcaggcacagtatctctttatc[209 bp omitted]gaggcaggagaattgcttgaacctgggaggcagaggttgcagtgagccaagatcacaccactgcactccagcctggcgacagcgagactccatctaaaaaataaaatatctgagcttggctttcctctgagctggcttcattcgcggaaggctgttccctcctgatgggtgcagggatggctgccagtagctctagaaatgggatgcagtcttaaccaccctagtgggaagagagctcctctttcctgagagttccatctcagggcgtaggaccggctgtggctggctctgtaaccttcctgtccctgaccgatcattgtaacagaggttgtgggacggggcacctatccactcctagaacctttggggaggacagcggggagtcaaggtaaagtgaagaggcctatccaggctcctggggtgagagagattgggtgaccaaggctggtccacccaggggaagacaggaagagaagtgggccattctggcctcagacctcttcgtcctttcccagaccccacgccaaggcagagctccctgtgggatgagtttctcacttgacctgaaatctctacttgtggggctgctgcaagtgcacaggcttcaggaaaggtggaccacaccccctgtgccccaggctccttcccgagggtgtgcagcccaccatccagataggggtggatggtgcccaagtcgtgggggctgacaagcatggagagtcctgcagagaggcccagcaccggattcccaggctgctccttgagacgctgtcccacatgggccggtcactcacctgccatgagactcccaactgggaccttccctgcagagcctgtgaggtggaacgatggtgatggtgcccccttgtggggtaggtgcatgtggcaggcacagagtggtggcagcaactgtaacatacggttctggagggcagggacaggggcccttcctgtgtgccttgtggtgctgagtgccaggctgggtgagctcaccaagccctccctgggaaggtgctgttgatgcagcagggaggcccagggcagtcactgctctgtgctgttggcgacggagcagggattggaacccaggcgcctggcttcgaggcccgcatgctgtggggaaatggggctctgccatgttggtggttatttattgtcgtgaacaagagctcaggcctggtttccaggtgtgactttattgcaccctcgccctacctccccggcttgagaattctggaaaataccacaataagtgtttcttttctcttttgagattatgtaaataatacttgcctccatgctcttaaaagaaaatgacatctctatttccatgtgttgcggtgtttcctggtttgggaccccaccagctatccagtcacccaggcttgaagccaggttcttcccagcttctctctccaccctgcccatccctgtgcatgtagcagtgaccaggtcctatcgattatctgattatctgccggaagcctcaggaatgggagccttctgagtcagcacatcaccaggagcacggcctgtggccaggctgctcaggggctggtgatgttggtttctttcaccttaatgtgtgagttgtgtagtaatacggtcctatatcacttaatgatgacacattctgagaactgcgtcgttaggtgatttcatggtcatgtgaacatcctagtggacttacacaaacctaggcctggtcaggcctggtggctcacacctgtaatcccagcactgtgggagttctagatgggcggatcacctgaggtcaggagtttgagaccagcctgaccaacctggtgaaaccccatctctattaaaaatacaaaattagcctggcgtggtggcgtgtgcctgtaatctcagctactcggaaggctgaggcaggaggagaatcgtttgaacctgggaggtggaggttgcagtaagctgagatcatgctattacactccagcctgggcaagaagagtaaaactccatctcaaaaaaaaaaaaaaaaaaaaaaaaccctaggtggcatgcctactgcacacctgggctacctggaatagtctagtgctcttgggctccacacctgcacagcatgtggctgtgctgagtaccctcggcaagtgtaacacagtggtaggtatttgtgtatatgaacgtagacaagggacagtaaaaatatagtgggaaatcttatgggaccaccggctgcatatgcagtccatcattgactgaaatggctttatgcggcttatgactagacctgtatgtgcctcagtattcaaaagatgtaaaaaggtggacagagattcaacataaagaaatgatcaatgtttgggccgggcgcggtggctcacgcttgtaatcccagcactgtgggaggccgaggtgggtggatcatgaggtcaggagatagagaccatcctgactaacacagtgaaaccctgtctctactaaaaatacaaaaattagccaggtgtggtggcacatgcctgtagttccatctactagggaggctgaggcaggagaatcccttgaacccgggaggcagaggttgcagtgagccgagatcgtgccactacactccagcctgggcaacagagcgagactccatctcaaaaaaaaaaaaaaaaaaagataaatgtttgaggtgatatgctaattaccctgactcaatccttgtatgcatttatcgaaataccacatgtaccccataaatatgtataataattatgtattaataaaattaaacattttaaaaaatgtatatagagagaaggaagtttctctctccctgtcctcctttggctttgccagctcaccttcctaaaagcagtcacctagtttattgtatgtccttctggaaggatctctgatggagcttagctaatgacaatccacagcagccacagcccaggccagccgacagagtttgtaaataaagttttatttgcacatgtccaggctcatttgtttatatactatctattactcttttcatgctacaaggcagagttgagtagttgctgcagagcctagtctgatcatttaagcaaaatattgtgatgcctgcagctgtgtgtgtttaaagtcaaggcagggtggtagaggcagcggcagcagcaggcccagaggcagcggttgggtttgcagcgagaagacaaggttgagtcagtgtgtttgcgagagctggaatcgaagcctcttaaaatggcagatgatttggacttcgagacaagagatgcaggggcctcggcctccttcccaatgcagtgctcagcattatgtaacactggcttcgtggtgctcaaaggctggccctgtaaggtctttgagatgtctgcttggaagactggcaagcacagccgcgtcaaggtccacctggttggtattgacatctttactgggaagaaatataaaaataactgcctgtcaccttataatgtgggtgtccccagcatcaaaaggaatgactcccagttgattggcatccaggaaggtacccctcactgctccaggacagcagggaggtgcgagaggaccttcttcgtctgccagaggagaccttggcaaggagatgagcaaaagtaccgctgtggagaagggaccctgatcaccgtgctgtctgccatgacagaggaggcagctgttgcagtcaaggccatggcaaaagaactggctcccagggtgacagtggtggcagcagtgatcttctgagactgcagaggccccctcctctggccttctgtaggctggactcttcctacacaatgtatttgatgttttattttgtttttcccaccccttcaatctgtcggggagcccctgcccttcacctagctcccttggccaggaacaagcaaagccatggccttggtgaagctgccatccttttccctgctcgcactacagccctggttggggggagacggtgggcgatgcttgtggtttatttatttgagacagagtctcactctgttgcccaagctggagtgcacggggcaccatctcggcttactgcaacctccacctcttgggttaagcagttctcctgcctcagcctcccgagtagctgggattacaggcacgtgccaccatgccaggctaatttttgtatttttagtagagacagggtttcactatgttggccaggctggtcttgaactcctgacctcgtgatctgcccgtctcggcctcccaaagtgctgggattacaggtgtgagccactgagcccggccttatttatttattttaattcaatctggaatcagaaagcggtggattctggcacatggtccttgtgccctccccactcacccctggtctggtcccctgttccccatggtcctataccctaagcacgacccccacagactaaggccagccccctgccgtacctgtgcctctccccaaacccctttagatggggagggaaaaggaggagcggggaggggtcctgcccccatgggctttacccttccctgcggtctctctccccaacacatttgttaaaatcaaacctgaataaaactacaagtttaatatggaaaaaaacaataatagtcgaggcagacctgggccttttagtctgtactcttgcctctgtgagccttgactctgaaaaggggatagtaaaaggatgtctcttggggtggctggggggcttctgtggggtccaggcagcacaggacctaaccagcagggtgccaagcagggggatgcctgggctgcaggcattgactcgcctgtgtcccacaacccctcttggagctggagcactagcgggggctcagctgccaaaacccagggacaggtgaggctgtcaccatccaagatggcaatctggtgtgccattcctgactgccaacctgcacgatcaggtcccctccccgtgagtactacaggggaccccactcctgcagaatacaatcctcccatgagcctgaatccatcctgttgctgctctgcccctcgcccccagtggctccggtctcctgcagaatgagagcgaagtcctcaccagggtccacggggtcaccgtcccacatcatccccagtgctcccctcccggtgtgctttggcgccgagcctgctcccaccgtcacacttaagcctgccccagtggttgctgcctgccacggggtttgcacagggactgcgcagtgggcctcctgaatgaagacccagacctgagcccggtggggcctctgggaacactcctttcaaggccagctcaccctggctcctttctgttcattccaaaataacaaaataacacctgcattgcaaagcgtggttattctgagcctggttgccatcacagtcatatggggacctgttaaaatctgggcccctgggccctagctaggacctcctgactctggtgctctgtgaacctggctcgcagacgtcccgatttcatgtggtggacactggggcatgggaaggtcatttccagccagaggtagcatggttgttacggagcagccctaaatattcctgctccaggcttgtctggacttcctccctccccatccctcctctgagagttgacaccctcccactgtgtcccccagcccgcacagtgttgcttcctggtgttttgactcccacttggatgactgtgtctgtttcccccgccctgctccaggctggcacggatggtgtgagtcatcaccgccccctgatgcccaacctgtccttgcatctcttgggtaccattgcacctgtgtgcaaatgccagacagacatctctctgcctgtcacctgatgcccggcgtcaggtttctctctgtccctttgtgagggccacagccggcgggagtgggaggcaagctctgtttgcccttcatcctctccctggggagctggctgccacctgctgggcgagcggcagagccccatccctgcagcagcaaggccctgcccgccagctgctgcacagcagcatctctccctggagctcatgcctttcaccatcccacccagggctccccacaccctgcctccgccccagcccttcccctcctcaggccagacaagggagccgagagttgagctgtgctgtggtttcaggtcaagacagtcctggggtgtgttccagtcctgccacttccaggctccatcccttgggcaggtgtcttttcttctcccagattgcttccctgataagatggaggtctagttatgccagcatcataggggtgctgagctggccaagtgaaattgtgcatggaaagtacttaggagctgggtgaggcggctcacgcctgtaattccagcactttgggaggctgaggcaggaggattgctggagcctgggagttcaagaccagcctgggcaatatagcaagaccttgacccctttgttttttagaaagtgcttattagcactatgcattacacagagtaagtttctgataccgggaagtggctgccaccatcaccaccaccatcatcacgtttttctccatttgtgtctcctgctgactaagccacactgtgacactggtgccagctacttcatgggtgctctcacgtcccttgttgcctgcgaccccacaggtgtccctttcagggagggaaagaggttgctgtggtcatttaacacagcctcggcaggccagggatggaactcaggtcttcttattccaagccgttacctctgcagatccatccccaacacatgcctgctttgtagaaaatactcacacacccaaacacatgtgttttgaacacacctgtcctcctctctgacagccacttgaattctggtccctgcttaatgggccttcagagccttggacttgagcaaatgcatctgagccctgaccttgagacccacactcacacacgtgcccacccccacatacttgtgtgcacatggtggatttactgcatgctggaaaaacaagaggaatgtaaaagctaaggagcagttacgtattttttcttttcttttttttttaagagagtctcactctattgcccaggctggagtacagcgacacaatcacagctcactgcagcctcaaactcccaggctcaagctatcctcccatctcagcctcccaagtcactgcgaccacaggcatgtgctaatttttgtattttttgtttgttttgtagagacagggtctcactttgttgctcggctggtcttgaactcctggtttcaagtgatcctctcgcctcagcctcccgagtagctgggattacaggcacacactaccacgcctggctaatttttaaatttttggcagagatggtatcaccatgttgcctaggctggtctcgaactcctggcctcaagtgattctcttgcctcagcctcccaagtagctgggactacaggcacgcaccaccatgcccaactgattttttagttttttgtagagacaaggtctccctatgttgcccaggctggtctcgaattcctgggctcaaaggaacttcctgccttggcttcccaaagtgctgggattgcaggcatgagccactacccctggaccaagtgagcatgtatatgtgtgtgctaagcactggttccagggagggaccctactaactcactcactcgccacacgaccctgggagttagttacactcatccccattttagggataaaacagttgaggcacgggtcacattgctttgctcaagagtttgagttgggcgctaggatttgactccaggcagtctcgccccagaactcatgttctttttgtgtgtccgtgagaaggagtttcactcttgttgcccaggctggagtgcagtggtgcgatctcagctcaccacaacctccacctccacctcccgggttcaagtgattctcctgcctc[225 bp omitted]aggtgggacctgtgagatgctgtgaagcccacctaaggtcactgagtgtgtgagagagacagcaaagatcccagccccatccctcagggccacagctgtgccctaaccactgcgcagcccttccctttggaacctggctctgagctccagcccaggccctacaccaaagcctttgaatgaactacagtcctgccatggctgtttggccttgcctgtggaataggggtcctgtggctatgctcccctggatcctggggacccacccctttatgagacttcagtcactctgcctggaagccgtgactgacaaagatcacctgcttcctgctgccttaaaggagacactgggcatcacatgaccttttccatgtccatcatggggtcatgtgggctgtgacatggcagagtcagatgggtccaagctggccctgtggtcagacgtggtggacccatcacctcccctcgtgagtccgcattgagtgcagatactgaggaactgggtgtgaaatgcctcgggtagcatctctcatgtggttagtgctcagtacgccagagtcagttattttgacccacgcctgctcatgaactgtttcacgctgccattttcttcttagccacctcctcacaccattttaaatggacaggtgtgtgtaggggcccatcctgggccagccagctgctctccctgcaactttggacaagttatcgcacctctgccccatgccgcagttttctcctctcttttttttttctgaaattttttttgtagagactggctttgttggcaaggctggtctcaaactcttggcctaaagcaatcctcctgtcttggcctcacatagtgctgggattgcaggcgtgagccatgtgcccagtctcctctctaaagtgggaggatactaatactcccgtgatggaagtgatcagggaattgaagctgtgtttatttgcattggaagtgctggggatgggcctggcgggtgtgagtgctgtcagcgcgaacttcctctctgatctgcccatgctgctctttcttttttcttattaatagattggtttcttttttatttgaatacatttggcctcatttctaagcaatagtatttgtaaaatcttagttttggtgtgctcattccttttttttttttttcttgagacagagtcactctgtctcccaggctggagtacagtggcacgatctcggctcactgcatccttcacttcccaggctcaactacttgagagtgcctcagcctcctgagtacgtggaactacaggaacccaccaccacgcccggctaatttttgtatttttagtagaagtgcatttctacggcgcttctgtaagcacttgggcggatgtgacctcctcggtctctgactctggtggtgactcctgcaaggccggacctggttccagaccctgtaggtgcccagctgaaggtgtggtctgattgctgtgtggggagtgaaggttgccagcctagaaactgggcctcaag[143 bp omitted]aaaccccatctctactaaaaatgcaaaaattagccaggtgtggtggcgtgtgcctgtaattccagcaactcgggaggctgaggcaggagaatcgcttgaaccagggaggtagaggttgcagtgggctgagatcatgccactgaactccagcctgggcgacagagtgaaactctgtctcaaaaaaaaagaagaggtgccatcccaatgcatgagaccggctgccattgtgtcaggggttatggtggtatccaccctgatgccacagccagctctgggccagcctcctcgccccagcggtgcccacccccagcttgatcctggaccctggcaatggtgtgacatgagctgctgctaagcgtttgcagtgctaggcccgggccggactttctccacaaacgatttagttccgttagttcacccaccctgtaaaacagctacgcttctcttccccgtttaaagcttgaggaagctgaaatgtggagagttgagagtggctccagagctcctgagccaggggctaggacttgaaccctggcttcagccgccacagaggacagcttagggtgggcctggcctggctccctgcttcacagagtcgatgcgttcgctcctggatgaagcgcctggcacgaagtccgtgggcagcgctgctctgtgtgtcttgtgaattcttcttatgcttctgatagttcctccaattttgcatttcctttttttttttttttttttggaaatggagtttggctcttgtcacccaggctggagtgcaatggcgcgattttggctcactgtaacctctgcctcccaggttcaagtgattctcctgcctcagcctcccgagtaactgagactacaggagcgtgccaccacacccagctaatttttgtatttttagtagaggctgagtttcgccgtgttgccccggctggtcttgaaatcctgacctcaagtgatccgtccacctcagccttccaaagtgctgggattacaggcatgagccaccatgcctggcctggaatgatgatttttaaggcgaaacattaaataggattgcaaaggatgccagttggaatatcattagctaaatgctcttcctcactgaattgacatgtgaagcgataggatgtagcagcagctgtaataaggccttcagtctcagagtagtgatgggcattcagaatctgcagtaacttgatgcaatgggaaaatatctgtcgtttcttttcatgtcagtctcaaggtctgctaaacactgtttcttttctctctctcttttggcctctgttaataagaaggaaatgctaaatttcagttccattcatgaaaataaagagataagtgtctcccctcaagttcgtgggccctttgggggtcaaatggttaagaccagggcatgcatgggcttgtccatggcttggggtagctgctgcagtcctgggggctgccttcccaggcagggcaagctccggtccccactagagctccagggtcaccaagcacatgggcctttgtcagacagctccctttctgtctgcaagaggggcacctgccatcagctgatcccctgcagctcctcccaggcctccacccccaaggaggaggaagtgctcaggcagggaccaggcctgacctctggggaggctggcggctggcctctgtcggcttctttcctccagcaccgcagttcagcaacccaccgccacccagcacagtggccagagcggagtcccagggtctgatgttagactctgctctggaccagccacctggtcccagggagacaccatactttacccagacctcagcttcttcccctagaaaatggggcagtgcttgatgagaccaggggtccagagcccctggcctagcagggtggcaggaggaggagtccacacggagatattactggactgggagctctctcagggactcccactgcgtccagcagcagcggattggcagcagggcgaggggccccccccccaagaagctgccagcaagccctcttcctggcccccttccctgcccattgtggcatctccatgcccaatatctgctggcccgaagatctttctaacggccagtcctgacctctccctcttctgctcctagcctttccttcctgctccgctggtcaccctgaggtaaaatccaagctctaatagccaaaaactggaaacagtacaaattcctgtcagctggtgaatgggcaaacacaacgcagcacatcctataattactcttcagcagtataaagggactgaaactcacgctcattatgctcagtaagagaagccaaccgcagaaggccacacagtttcaattccattttaatgaaatgtccagaaaaggcaaatctgtgtagatagaaagcccagccctcccttccgcatggtggcggctgtggccctccagggaccggggctgcagctgttgggtttgggctacgtcccttcattcatgctgggagccactgcctgttagcctgggaacacccgggaccaggcctgtctcttccaactgcttctgtgtcctgcgtcaaggggccgggccctgaatagcgtacggcgatgtttagctgttgagagtgttttgggagtggggatcctgagaggcacgtggcattgtagttgagagctgagttcaaagcccggctcgcatatataccaggtgtgtgatcttgggcaaggttgtttctctgagcttggtttcctcatagggttgaagtgaggattcattctttcacccaaaaatacaaaaatacaaaaaaaaaaaaaacaaaccaaggaccaagtacagtggctcatacctgtaatcccagcactttgggaggctgaggcagaaggattgctgaagcccaggagttcgagaccagcctgggcaacatagtgacaccccatctccaccagaaataaaaatgatctgggcgtgacagtgcaagcgtttggtctctgctgctcgggaggatgcttgagcctgggaggtcaaggctgcagtgagccatgttctcaccactttacttcagcctgagcaacagagtgagaccctgtctcaaaaacaaacaaaacaccgagacagtgttggagacatggtggtgaccaagacagccccagtcctgtcctcctgggctcccgggctagtaggggaggtggctgatgtgtagaaagattgtgtgctgttcattgtgtatttgtgtgaaggtgcttggagcggaggtgaggcgtggagggcagtggtgacttggggtgggggtgcccaagggcactttacctcgggcagtggccagcggggggcctgaaagggaggacagagctcaggcagcctgttgttgggggagggctgaagagggcagtatgggcagaggccttagggcgggagtgggtggagccccatgaaggactcggggtgtggacagtcacaggcctgggtcccctgtgcctgcagcccagaatgtgaccgtggacgaggtcatcggcgcctacaagcaggcctgccagaagctgaactgcaggcagatccccaagctcctcaggcagctgcaggtatgggcgggacagggtgggtgcgtccggtgtgggtgtcaaggggggccctagggtggaaccagcccagcaggagagggcctcccactccccagccccaggtgttcatgaatacatctttgaaagcctgctgctcagctagagaatgaatcagtttcttcataaatttgaagagcacagaattctataaagtaagacattcaggtatctgtcagccccaaaagaaacgctgttccctggggaagaggcatatctacgattcttgtgagtctgaattacaaaatttatgtattctttttttttttttttttttttttttgagatggagtctcgcttttgtctcccaggctggagtacagtggcgccatttcggctcactgcaacctctgcctcctgggttcaagcgattctcctgcctc[133 bp omitted]acctcagcctcctaaaatgctgagattacaggcatgagccaccatgcccagcatattcataaaagtcagaattacagaaataacacatatcctcagatttaaaaaaataaaaatactacagatctgaaaagccaaatccacctcttatctcttgccccaaggccccctcctcgggaacccccgttgttggccactcggcatttcctggccttttctgtgcgttggcaaggtggctattgaggggtacctgctggttttccatttggtcgctctcccaccctgccggtcccccagccccctccctcggcacctctcctgtgggccccggcctggcgcctagtcagtgaagcaccgctcgttccgagggttccagggttgcctgtcctcgggctgttgtaccctcagctgtgctggaagcaaccacgctccttgtccatcagtgttcactggagttagggtaggttctctggaacattccagaagaggggcttgtcaggtcccaggaagggtggctgctcagtgtggcagctgagagggtgggtccttggaccccatcggcctggttcagaccagccctgcagcacccaccctgcaggtgatgtgtgtaagctcagagcgcgggtgctggcatctgcgggacggtgggttctgactgggtgctgggccccaggccctgccttcaccaagaagcctcctgtgcccagccttgccatcttcccaggctcatttcctgcctcacagcctttgcacagactccctcctctgctgggacatacccagagatgctgggcccactccctcactcggtcccgctggggcagagggcttcgcccaggcctgcctggctgcagtgctggctggtcctcagttgtgtgggtgcagagttctctcgctgtctaaggccctgtaccccaggttccagctggtgggtggcctctgagcctctgttcagtgccttcgcccaaaccccaccccagaaccctgcctgacctcaggcatagcagccatttggggcctcggctgcccccctgttcaagtgtcttcctgccttaaccccactctactttctcaggaattcacagacctcgggcaccgcctcgactgtctggacctgaaaggtgtgtgtctggctaggggttgagagcccttgggtcatgggcaggtcgggggctccctagagctgggtctgaggacctgcctggggttagcggcttctggagctgagctcagccagggcaggggctgggcctggtggggggtgggaggttgggggcagagggcccttccagccatgcaaaggtgcactgtcttagacatgcgcacggctgctgtctccccccaggtgagaagcttgactacaagacctgtgaggccctggaagaggtcttcaagaggctgcagttcaaggtcgtggacctggagcagacaaacctggatgaagatgtgagcggccctgccaccgcccacttggctccctgagctcccgggccccttcgaggtttgggtggggagaggacactgcaggaggagggggtcccctagacaaaggctgaggggtggcgcaagggcggggcctcttgcagggcaagagggagacatccaatatgaccagagtggatgtggagggcgcgttggggcacctatggcccaccctcataagcaaggagagccttagggagctgggctgaggggcaggcgtgtggcccccaggagccctttcaggaaccacgctggagggtccagctcctacagggtgggcttgggaagcattctgagagcagcctcccatcaaggcccaagggccctcacctcctcagccttgggagtccccaggcaccccaggtgtcgggatccaggggcaggggacctggagaactgaggcccaggctcaggaacaccaaggcctgtcctggtcactcagcacgtcagtcaaggactttggagggcaagtgacagaaaacaaaactgactacagcagagaaggaaagggtttgtccccgtggctcacggggccctgtctgtgcttgtcctcctctcccgtgtggctctctccagaccctggacccatcgtctctcggtggggcccggtgtcagggcccacgcctctcctccagggcagcccagagctgaggctgagcccccgaatctctatgcgcagggtgcctcggccctcttcgacatgatcgagtactacgagtcggccacccacctcaacatctccttcaacaagcacatcggcacccggggctggcaggcggccgcccacatgatgcgcaaggtgggcgcctctcggcttccaggaagaggcagctcaggctcccagcacggggaggcactttctcagggcatggcccgtaggctctgactgcatgagctcttgagtgtgggctgttgtggggatgctgggcctggccctcaggccaggagaacagggccgagaggtgtcctggcccccaggccccctggccccttctctccttgcgaggcatttcatgacctccaacttctcccttccgtaatgtcatccttctgtaatgtcatccccttggaggtggccatggtcgccatccccacgtcactcctgtgtgaaggctgggtggagggacgggacggggctatctggtaacctcccagccacacaggagttggagatcctggctgccaccagccctgcctcgctcacccacaggaccccaggctgagccttccctccccagccacagttacccccattgtaaaacaaggcgacatagccagacgacagctgtggcttcgttgctcattgagacatgggggcacaggtcctggggccagggagtgctggggcggtcctggggccagggagtgctggggcaggcctgagccagtgcctcacccctgtcctcttgcccctgcagacgagctgcctgcagtatctggacgcccgcaacacgcccctgctggaccactcggcgcccttcgtggcccgtgccctgcgcatccgcagcagcctggcagtgctgcacttggagaacgccagcctgtcggggcggcccctcatgctgctcggtgagccccaagcccgggagggtgagcaggatgtgcagcctgttggggggcaggggcctgcccagtcaccgtgccccctccccgtccccagccacggccctgaagatgaacatgaacctgcgggagctgtacctggcggacaacaagctcaacggcctgcaggactcggcccagctgggtaacctgctcaagttcaactgctccctgcagatcctggacctccggaacaaccacgtgctagactcgggtgggtgcagtggcccaccccacccacacccgtcacccagcacccactctgcccggccctgcgctaggtggtgctggggacacagacatggccaagaccaccccaacgctgtcctgctggggctcccaggaggaagacagacccgccctagacagtgacaacctagagtgggcaggactgggctggtggagcccagaggcggggtccgatcagtctgggggccagggagggcttccaggaggaggagacagctcagctgacagccgcaggatgaggcgaagtgaataattacaatctgaaaagaaagcagtgttgctgccataacagggtcagctagaggctgctttcagatgggagaggagggaagaccaccgtggggcggggcctctgggcttccatccggaggctgggagcagaaccagccttgtgagaagcctgggaaagggtccagaccgcgggagcagtgagtgcagtgggaggagctctggtgtttgatgctgggggttgagcagagaatggggagccgtcaaaggaggcgttcctgttgcatcctggaggggtggggtgggtcactgtgtccccaggtggcaggcccagaccccactctactgagcacctgccaagggccatggctgtcggcccctgggctcagctcggagggagacacagggctctgcccttgggagtttgtactccagtctagagagacaacgataagatgagtgaaatctccagcctgtcagatggtgggatctgcattggagggagacagtggtgactgtgggtgggagtgagctggctgtgaggtgaggtgggccagaggtggtcacatttgagcaaagatcagaagcatctggtggaggctgtcatccaggcacccaggcccaggggtcacagatgtgtgcccaggggtgccaggccgaggcagggctgcagggcaaggcctgggactgcggggcctccatggaggtcctaagcagagggggttgctcctaccctgcagtcccctccccaggaagcacccggaccccagacagggctctgactgccggcctcctccaggtctggcctacatctgcgagggcctcaaggagcagaggaaggggctggtgaccctggtgctgtggaacaaccagctcacgcacacaggcatggccttcctgggcatgacactggtgagtcaggctggcagggaagggaggcacctcggtccccgctgccacctcccactccagctctcagcacagttgcctctagctgacggctcctgtcctgcccatcctgcaggttcaagacgatttaaactcagccccacctgcttcctcattcagcttctgtgcctgttttccctgaggaggagcccttctttcattatctcctttttttttttgagaccgagtctcatcctgtcacccaggctggagtgcagtggcgccatctaggctcactgcagccactccagcccccgcctcctgggttcaagccattcttctgcctcagcctcccaagtagctgggactacaggtgcccgccaccccgcctagccaatttttttattttttatttttattttttttgagacggagcctcaatcgcccaggctggagtgcagtggctcgatctccgctcactgcaagccccacctcctgggttcacaccattgtcctgcctcagcctcccgagtagttggaactacaggcacccaccaccacacccagctaatttttttgtatttttttagtagagaggggatttcaccatgttagccaggatggtcgcaatctgaccttgtgatccaccctcctcggcctcccaaagtgctgggattacacgcgtgagccaccgcgcccggcctaatttttgtatttttagtacagacggggtttcaccatgttggccaggccggtcttgaactcctgacctcgagtgatcccccccacctcggcctccgaaagtattgggattatgagtgagtcaccgtgcctggttttcagtttttatgtggtgcttaaagcaagccactcaggtacagagactctcagggcgagcactcgtgtgctcaaaccccgggataagagttgccctccttgggggcttcagggcgctcaaggtccaggccctggccaggggcccaggctgtggggggtagggactgactgggtgcctggggagctgggagtggacgggggacctggcatttggggagacttcaggcacaggagggacttcaggccaggcctgcggcagggcaggacggcgccggtgttcacgcaggcgcgcgaaagaaaaggagcgcccgggcctggctctcttcccggcttctttcctgacttggcctcctgggtctcctccgccatcacggcctcctcctcaccctcacaccccctccctccagccgcacactcagagcctggagacgctgaacctgggccacaaccccatcgggaacgagggtgtgcggcacctcaagaacgggctcatcagcaaccgcagcgtgctgcgcctcgggctggcctccaccaagctcacgtgcgagggtagggtacggggccgggccagggtgcgggctggtgggctcagccgggcggccagccgggtgtggggcccgtggccagcccctgcggtgcccccccaggcgcggtggcggtggcggagttcatcgctgagagcccccgcctcctgagactggaccttcgggagaacgagatcaagacaggcgggctcatggcactgtcgttggccctcaaggtgaaccactcactgctgcgcctggacctcgaccgtgaacccaagaaagaggcggtgagcaggggacggtcctgcagccctggggcgggcggaaggccgggtggtggggccggcctgagagccctagccaggcgctcccgccacaggtgaagagcttcatcgagacgcagaaggcgctgctggccgagatccagaacggctgcaagcgcaacttggtgctggcgcgggagagggaggagaaggagcagccgccacagctgtcggcctccatgcctgagaccaccgccaccgagccccagcccgacgacgagcccgccgctggggtgcagaacggggcccccagccccgcacccagcccggactcagactcagactcggactcggatggggaggaagaggaggaagaggaaggggagagggacgagaccccctgtcctgccctggtgccccccacggactccctgggccctggggacaggagtcccccaggcagcccctccacacccaccgagcagcggatttccgtgtccagcccgggccggggccacaaggtgtttgtggtgacccgggtggagagcccgcccgagagggcagagccccctgcgtcccccacccctccctctcccccaccccctccctccccacccgcctcaccttccctaccaccagccggggccattgacacccgggacacagggtcctctgagcctcagccaccaccggagccgcctcggtcagggccaccactgcccaacggcctgaagcccgagttcgccctggcactgccccctgagccgcccccggggcctgaggtcaaggggggcagctgcggcctggagcacggtgagaggggccctagggcaggtgttgaggggccctgggtgctgtatgtgaccccaggcaagcccctgcctgttgtggacctcagtttccccctctttaaaatggttctcgcaggggccagcaaagtggggcttagttctcatctccaccctgcttcccttgggtcctgggagctcttcctggggtgggggggcatgtaaggtgtgctgccttgagcctgaccatctcagcggtctctgggcactctgcaggccctgagggtctggctggggccgggctggggacaggttgtatttgccccacccgcctgacgggggtgctggcccgtcctcccacacagaactgagctgctccaagaacgagaaggagctcgaggagctgcttctggaagccagtcaggaatccgggcaggagacactgtgacactttaggtgaggccaggcccggggcccacagcactcgggaggagctgagagagcctctggctctgacagtctctcccccaatctctcctccccaagttccctttttccggtcggtctgcgatgagctgaggccagagccatgagaatctgctcaccttccccccagccttcctgaggcccaggatgccaggggtgggggccattctggggcccccctccccccacagcaacactacaaggggtgcaggagctacagggagtggccctccgcgcgtgactcaagcacttctatttatgagcccagcactggaagactctgggggtgaatgggaggagggggagcaggaggaggaggaggtctccaaggacatcaggcgcctgttctggaggggccaggcttgccctgcggagggcaggcgtcctgggtggtggtgggatggtcccctgtggccccgggcacagggccgggcaggcagcctggtgccggagaggcggtgcgtgctggtggtggttgagatgcacagaacagccccagacagcgcaggccgggcagggtggggggatgggagcagaggatcagagctttctttttctcaagtgcaataaatctatcagggagctggggcgggagcagccggcactccgggaccctgctgtccaggccactggaggctgcgccctgagaggcactacagccctttgggggcgagtggcatgggtgtgggtgagggtgggcagagggctggggctactcctgtcggtgcaactctgttcacaccttttctaataaactggggctgggttcactttgcccaacgtctgcttcgtgcggatcctggaggtggttgctgggggtgggctgggtggaggccatcacagctcctggttacagagcatctgccagggcactggtcaggcattactgcgtcttcccccacagtcccgtctattctgcatccatgctctggtgtctcgtacggtcacctcccagccaggcgagtttacacccatcctttctgcagggagagacaggccccagatacctcctggcttcaggtctagggtctcaggatgctggatatggagtggctctgcccagtcgcccatcgctcaacaggaacagatcccagcctgtccctggcagccccaggtgttgtgcaggtgggagtatgccccgggcccagccagcactgcaggagcctggtgggcggcttgttcccctttgccagcaggggcctggggggccatgggggtgctgttgcggatttctgagaggtctgtttttccctttaggaaaggggggagcaggccgggcatggtggcccacacctgtaatcccagcactttgggaggctgaggtgggaggattgcttgaacccaggaatttgacaccagcctgggcaacatggtgaaaccccatctccatagaaaatacaaaaattagctgggtgtggtggcgtgtgcctgtagtcccagctactgaggaggctgagttgggaggatcgcttgaacccaggaggttgaggctgcagtgaggtgtgattgcaccactgcacttcagcctgggcaacagagtgagatcctgtctcaaaaaaaaaaaaaattactaaacgagcatttctgggccacccatccccttgtttcccgtgtgggaggctgacatggatggaggcgttgtggtgacatcacgagaaccacagtcgcaggctggagccctggtgtcattcagctcctgcacacaccagggagtcccctgcccccagccaccctggcctctgggaggaacaccttaggaagccactgctggtttgctgtttggtcccttgcagctgtaagtgtcctaactgctccccaggtcagccacggctaggactcttatttgggcgagggacttagggaagctacacagaacagccgccagcagcccgcagcactcttcccatccctgcacagccagcttgtccccagctctgctaatgtgcgatgtggccatgggtgaagggaagaaggggccccctcctggccactgtggatccagcccgtcttggtgaggggccggggcatgtgaggtgtttgcatcaaggtactgagagacctctgtccttcgcctggtttgggtcagcacagtgccccaacgatcttcagaggcccttggtcgatattagccgttgctcatggtctcagcctctgtggaggcagctgtgttggggtctcacccagcccgctggccgtctgcctccccaccccatgtgaggtatgctaggggagggacagggatcctcttcccagcctgtcccttgatttgctttcactaaattgagcttggagtgaggaactgggcctttcttactgttgggggttgaattgtgtctcccacaaaaaaagatgtttgtttatttatttattcatttatttattgagctggagtctcgctctgttgccaggctggagtgcagtggcgcaatctcggctcactgcaacctccgcctcccaggttcaagcaattctgctgcctcagcctcccgagtagctgggagtacaggcgtgcaccaccacgcccagctaatttttgtacttttagtagagacggggtttcaacatgttggccagaatggtctcaatctcttgacctcgtgatctgcccacctcggcctcccgaagtgctgggattacaggcgtaagccactgcgcctggccaaaaaaagatctttaaagtccttacctccagtaccccagaatgtgagctcacttagaaatagggtttttacaaaggtaatcaagttttaactcattttaatgaggtcactcgggtgggccctgctgcagtctgattggtgtccttattaaaaggggcatttgggcacagggagactgccacgtgaagacagaggatggggtgatgcctttgcaagccagggagtgcggagatggccagcaatgcaccaggagtggggagcaggcacagagagcccctccttcatctggaacttttagcctccagaagcgagagacgatacatttgtccttcaaaggcacgtggtctgttagactgtgttagagcagctctagaaaccacagccgttaccacaacaccccagcctgccgcgctcctgattttctgaagggtcccagatcgagggctggaggctgagaggatcccccttgccatcttgtcttccccttcccttcagccacccaagtgtcacccgagcttgtcacgttttggtagcctttgctgaagacgtagggggtctgtttcatgcaagatctcaatgtcctaacacaggagatgtttattgtcacatgtggatgttcagagtggcaggcagctcttcaccaagttattcctggacccaggcccctttgaagctcttagggctctgttgctccccagggcctcaaggatcccggatcaagtgggcagatgggggaagggagtggagaagggaaacctgctccctgactcattgctgggaaaggcgcacaggtcagccgtgctccttttttgttcgtgacaacggtcccgtggctttacacaggtgcaagttctcatagcagctccacgtgaagatacagtgaccaacagtttggccacagcttgtaccacgtaacagaggctgcggcttttttttttaatcagtcggagtcttgctctgtcgcccaggctggagtgcagtggcaccatcttggctccagccaccacctcccgggttcaagtgatcctcccacctcagcctcctgagtagctgggattacaggcatgcaccaccatgcccagctaatctttttgtatttttattagagacagggcttcaccatgttggccaggctgatgcagcttcttactgaggcatggggggcttcagtcctgccctcacctccagccaagtctacacgttagcatctctcacagcaccccactcctggtaacaggagtgaaaatttattttcagcttggattccaggtggtaagaaacaaacccaactgaaactggcttaagggaggctacagggatatattgaccccaaccacacatctacagaaacagacttaacggtgtcacgaggccccatccttctccctctgaggccagctctccctgactgctgggaaacagctcccaggaggtccaggcgtatcctaccagcttagtcagtccaggaatgggaaacagcacctctgcttgcccagccccagggaagatcatagagggctcccactgacctgcatgcacctgtgacaattgctgtggccagagaactccggtgctgcagccagacctggatgctatgcccagccttggaactaaagaactgtgaggtcagtgacccagtcccatggcctgagggtgtgtgcctttgcagagctctcaggttcctcgggggctgtcccctccaccagcctcagggccctggctcagaagccacaccctcagcctcatcccagggtatgttcagtgttggcccttgtggcccctgccggcacacacttggaactgggccaggcaccccagggcctgagcgtgtggctgaacatttgaccagtgaggaatcaggaactgcccagaggagtgacacccacccccagcccagggctctgcccagagggaaagtgggggagccctagtgtaacccctcctggctggctgtggcttgggccctgtatgtccccatctctgcccaacttccctgtcctcatcagggggctgatgcagtggcttcagtgtcagtgactaaccagtggccctggagtgactcgtaaggcaggtaccctgtggacagttatttgtctgggggaggttagtgccacccactccagctggctgaggtgccagcgaggtctaacccattacgttgagaatggagccaccctaggggtggagcagcttgctgaggtcaccgaggtcatcctcagaaatgccagcccctgccctactcacagaggggcaagctagggcatggggacaaggactgggattccctgaggcctgggcgctccatgttgcctgagtcaacctggcccatccacctgtcatctctgcagcctcacccaccacccccgcagcctctcctgccacagagatgccagatgaggaggccagcatggtgcagaggagtaagtgggcttagcaggatggggcaggccctgtggcaggacggggcaggcctggtccctggtcagatcaggatgcggagagcaactccgggctctcaacacctccatttattgcatgtataccctgacttcctcactggtccttctgtgcctgctctcatgctggcaccggcttgtggccgcactccttggaagctatgtccacggctctggctcaggttcacctgggggtgtgggcctcacagggctcattcggaccctgggttgcggccccagtccagccccctattctcccatctgggcagatggaggaacccttgcctcctgctgcccgccaagtcctccatttaaggcccacctgggctggattgccctggacggaagagcgcacaggccaccggccatagcttgcccctgtgggccaagtccccagtgtggtggccttcgccggcttgccctgaggcacggcccgacgggggcgccctggaggcgctgttggcccggtgggcagcgtggggggtatcgcgggtaggggacttgggcgggctgggcggcttgagcgcgctgacggctcggatgagacccatgcgccggcggatggagtggtccaggttgaccgtgcagcgcagcaggctctgcgcctcggccacggtgaaggggaagtcggcgcccaggaagcgctcgaagagctcggggtcgccgtccaggtcgagcacgttctgcaacgccttggtcatggtgtgcagctcgcggctgttgtcgcggaaaacgtcccagaggcgcgcgcggccctcgggcgcgcccccggtctgctgccggtcctccaggcactgcagcgcccagctcaggcggcacggccactggttggcgagcaccacccacgccaccgcctggcgcggcgtggggcccccaaagtccccctgctgctgctgctgctgcagcaggcgcacggtgatgggcacggtgttgacgatgcgccgcatggacaccacgttgtcgggcacgtactcgtagaggcagtcgcgctcgtcgtgaaggcagaagagcgcctcctggattcgccgcgccgcctcgtcgtcgatgcggccctgcccgcgctccgtccccgcctgcgcctgcaccgccagcagctgcgcgctctcgcccccggcgtcccccggcagccacggcttgcgcgtcatctcgcggtacaacaggtcgtcgcggctctgcaccgcatcgtgcaggaactgcagcttggtgcggcggcccataatgggcacagagaagggcagcgtgacagtgcggttgaggaagaggtagccgttatcggccgtgcccttcatgttgcccgcgctctctaggcacgcggccaggatgctggggtccacgaccaggatgaagatgaagggcgcgtggctgtcggacagcagcgtgttgatggcgttgagcacgcccaccacgcgctccgggtagcacgtgtccagcccggtgacctccagcaccacgcgcagcctgcgccgctggtagatctccaggaagcacaggaagtcggtgagcagctccacctccttcttcacctcgcacatgaaacccagctggctgccgaacttttcacgcgacaccagccgctcgatcttcttgcgctggcttacgaacaggtgcttgcccaccgagtacacggccatgagcagccccgagcccgacagtgtggtggccgcgccgccaaacaccttgagcaggctgccgctcgggctgccgtggcccagcgcgtggccgcccagtgacaagtagagcagccccacacccaggcccagcgccgccagcagcgccagcagccccaggcacacgcggcgccgacaatgccactcgctctggcagcagtcctgcctggtggccggcttgttgcccagcaccgagtacacgctgaagggcagtgcgccatagtggcggcggatgccctcgcacaacgtggtcaccaggccggcccacagcttgtcggtgcccgcgtactgccaggcgctaaagcggatgaaaaggaactgcacgttcctgcgccgcaggtgcacctcggtgatgatgggctgcaggaacaccaggtaccacagtagctgcgggacgccccagccgctcacggcacgcggccgccactgcacgtgctgcagctcctcgctctcgcgctgcgcggcctcctgctgcatcagcgctgcgggaagggagcccgggagccgcgtgagccgcagacccgccggggtgggcggggcctagtacgggcagggcggagcgctcctggagaggcgaggggcgcccagcagaggcgaggggctggaagcgagccgcggccgctccttaaagagctggaagccggtgcagaagcgggggcgtggagaggcctggagccgggcttggaccggaagcggtctgaaggccaggctgtggggtcgggatgggcagaggtagagccggcagaggagagatgggaggaggcaaaaagagatacgaggaagagccagggatgggcaagaggctggaggcggagcgagggtgtggagggcaccgggaaggttctgagagtggggcaggggacaagtggtcggtgtaagggatgaatgaatgagatgctgaggaggagctatgctaggcagcaggatacaccctcggtcttatcttgttgacttaactgctcctcctgcaggaagccctccctgatccccaggctgggtcgggggccctcagccattcctactctgggtcatcactgtctgaggacaagtctctctcccctgctggactgtgagccggaagggcagggtcctgcttgtcttggtcaccgtgtcccctgggcaccagaaggtgcttagggaatgcctgaacaatagatcatgagaaatctgaggtcacagagtgaatgagcgggagtgtctacagcacccagcaggaggagtagggactctctgttctttatatcctcttctcctcccgggaccctgtgacaacacaggacaggacagtgagtgctcaatggacagtcagtacaggaaggaaaggctattgggcctgcaccagggctgggcacacgtaggaggaacgtcagtcccagcccctctggccccacgtggggctgaggtctgagctccagcagggcttgatccagatcaaagctgctggggaggccagtcgcggtgagtcacgcctgtaatctcagcactttttgggaggccgaggtgggcggatcacatgaggtcaggagttcaagaccagcctggccaacacggtgaaaccccatcgctactaaaaatacaaaaattagccgggcttggtggtgggcacctgtagtcccagctacttgggaggctgaggcaggagaatcgcttgaacctgggaggtggaggctgcactgagttgagactgcgccactgcagtacagcctgggcgacagagtgagactccatttaaaaaaaaaaaaaaaaaaaaggccaggtgcagtggctcatgtgtaatcccagcactttgggaggctgaggcggatcacatgaggtcaagagatcgagaccatctggccaacatggtaaaaccccgtctactaaaaatacaaaaaattagctgggcgtggtggtgagcgcctgtaatcccagctacttgggaggctgaggcaggagagtcacttgaacccgggaggcggaggttgcagtgagccaagatcgcaccattgcactccagcctggagacagagcaagattccgtctcaaaaaaaaaaagctgctggggaacctggcgggttgcagttcatgtcttcagttggcatctatgtatcaggtactttgtgaccaccaagccttaagaggtgggtctgggtggcacagaggccagtaggggcttggcaggagcctgcagcctcaataaagagcctgggctttctgcctcaggtgctggggagcatggaaggcaccaagcacaggagggacagggtcagatctgtccttcagaaagagtccttggagtggatttggtggcagaagcagggaagggtaaaacttgggggcagccaggaggccagagaagcagagcccggggtagaggcatgggcttggggagggcctgggctggggcaggctggccacaggggtggggggatctgggggaagcctggagctgggcggggaccagaggccctgtttctcatcctccccccaacaaacacacacagctcctcacccgtgatcttgtccagcatcatgtgcaggcggcagccgaaaggggcatagaaacccacggtcacagggaccggcacgtggcagagtgtcttggccaggcagctgcagtagacgtcatcctctgtcaggatgtctggtggttgggagtggggacactgagtcaggaccactggccaggcaccaccctcctcccatctgccctccatggcccccactatcagccccttcctggcaccctgtgcaaaggggactcaggtcaaaccctgcagtggaggtttctgtggccatcagtggccctcacctccagggcgagctgtgcccctttgggtcccaccaggctgaggctgggaggctggaatccccccagccacacaccagaggctgaggctgcgggaagtcagctttcctggccctaggtcaccaggcttgcttggtcactagcccgtgattcccccggggaaaatcccaaaggcctttatttgggatacgaggccctcagatgccaagacaccactttccaccatcagcaggactccaggccactcctgcctgctctgctggcccggccagagcatggagaggccctgggccgcaggctcctcccaccgtcctgtccatcatgctggcaagtcactaatcccacctgagcccagggttgggagagagatgaccagactggagctccagtcccagccccaccgcctttgtctgcagaccccagggagagccacctctgagaggctcatttccctctgaagagtggggcagcagagacaccagggagcaggaatgccaaagggtctggccagcgccgggcccttggtcaatgtcatggtctccagtggccatttagggccctggggaccaggcactggcactacggcatccactctgcagagggcaccctgtcccccagtgagggttgcttcttggacctggaaatggggtatcaaaaaggtagggttcagtcttggggggacacatggggccagctttgtggtgcacagtgggggtaacacagccactttcagagaggcctggtgggctgtaggaaacgggccacacctggcggcagagccaggaggccaggaagcagactcaggagtagttctactgaggtgtgggtaggcgggtctaattccagctctgccagatcactgggtggccccacctcatccaccctctacttccctgtgtgtgaaatagacatcgtagccctgaggctccggtgacagggctgtgcccgacctaaagtccctgttgctctactttcaatccagacctggaaacccagccgtctccacctctgctgccgccaccccggcaaggctgccgcacctctcgcctggatttttgcaatctcctgctccctcggccacctgcttccgtcctcctcccatagcccattctcctggagatcctgtcagctcacatccatcctcggctcctgcctcctttgggcaaaagccgaagtactggctccttgctggcccgggaacatgcctcctcagggtctctgctcaaacgctgccttaatgaggcccagcctgacaacccgatttaaatctgcaaaccctgacatcccccatctcctgtccctgctttatttttacctagtgtggttgttaccgagtggcatacttttcgaggcaaggtcttgctctgtcacccaggctggagtgcagcggcacaattataagtcactgcagcctcgaactctggggctcaagggatcctccttcttcagcctcccatgtggctgggaccacaggcgtgcatcactatgctgggctaattttttattttatcttttgtagatacagggcataactatgctgcccaggctggtctggaactcctggcctcaagcgatcctcctgcctcag[135 bp omitted]acctctacctcccggtttcaagtgattctcgtgcctcagcctcctgagtaactgggattacacgcgccagccaccacacctggctaatgtttgtacttttagtagagatagggttgtaccatgttggccaggctggtctcaaacccctgacctcaggtgatccaccagcttcagcctcccaaagtgctgggattacaggcatgagccactgcacctggcctcccagccacttttaaatttccatgtttcctgtacctgcccccggctgcaatgcaatgtgagccccatgaagacaagagatgtctgttgatcccactccccactgtgcccctagaacagggtctggcacgctcagggtgctggatacctagtcatggagtgaatgagggagggagagagcaagcaagtgggtcttcccattgctgacctttgctctccgttccccaggctactccctagctctgtcttccccaacgccagagccagccaacaacccagggctcaccatccctgccccatgtaccctgtaccctgctgagccagaggagggagctgagaagagaccagagcagagccagggtgtcggcagagggaaagggggaaggagagggaggccttcactgcctggcgcaggatggaggcacggggcaggcctggcctggaagccttggaccccaacaggcaaagctgaggcagccagcctgagccccatggccagggacgcacccctcctagatagggaacagggtgtggatgaagagggcaggtgcaagatgctaggcagggagcaaggagagcaggtgggaagtgaggcggcaggagtggggacagggcccccaagaaggccagggtgagcaccggagctgtaggcagtgaaggagccacaggccgctggggcgggcaggggccgggcatcagtgggctcgctgggcttcaggaggacgccagccgcggagggtagagctgggccactcctggccatggctggtgccgtggtgggtaaggtgggcgcctgaggggcgctggcaggttccttggggacagtggaggttgcaggcagccccttctgggcttcgtgaatggggcagagccgctgccgcagggggctgggaggtgagggctgggactggggctgccgctgctgctgcaggacggagggcaggaggccccggcgccagccactgccacccacttggtggctgtggtaggccagctgccagtgtgattggggggaaggccgacagggcccatgggctcggagggccgctgagtcctggcgccactgatgacagcatcctggaaggaaggaagtgggggtgactgggcctgtgtccccgacccccgggggcaccggcacaagccagaccaagtcttcaggtagaacctgggggccagagtattcttgggagccccagaaacccctcaaaaagtaagattatgtgcgggggaggtatgggcaggggagggacccagggtctgtgctgtcccatggcgggggagcagggaaggtgcaggcttggacttcagctgggggcagagagaggacgcctgaggttggggcttcaatggaggctggtgcctgccacagcagattcctggatccctggggggtgccgccagtgcaggggtcagggaaactgagaagatccattgggagctggccctggctggcccagggaggccggagtgatgggtggtggcgtggagaggggtaggccagggatttgggtggggggtggaccttgtccccagctcgggccagggtggcaggaagggtggtgacctgggaagctccagccctcgccctagccctgaggaggctgaatcagccccagtgggagggcactgccccctccccaccctgaacaagatcacctgtggtcaccaccagaaactgggcccagcctcatccagacatgttcagtgggggggctccctctcctacccctcactcccagcacactgctcccctccaggctggaggccatccacacaggcctcagggtttggaaacggggcagggcaggccaggcggcccctgcttccaactccagcccaggctcctatctttgggcccgcaggccctgtggtccgggtcctgggtcccaggccctgctgctacacagatgcctctgggtggagtgcaagtggcttttctctcctggggatgacagctccccttctgttcctccattcactctggcttcctcacaggcctctgtcggccatcacccgcccccaaactgaacccgtaccttttcggtgccccaactctgggtcccagaagtagtgcccgttggggctctgggcatccttggcgaagtggactttgtaatgtttgtgcatggcagccgggcagctgggtgctgggggcctgctcctgaggcaggagggagcacacaggcttggcgtagcctctggggcacgaacagcagagagctgaggtcagggtccctgccctgcccgacagcttggacaggggaaaggccaagtcccagatgctgggttcctaggtcacttgggagaagggggtagaggtggccttcagggtacagtgaggggcaggataaggagggatggccagaggagggaacggagaaccgctggggttggctaggggttaatttgaggctgggtgttgggaagctcctgggagtttccaagaggctaggacactggggagtgctgagcagacatgggctggggaaatagggggtccggtgtggtggctgagtgaccaaggggtcattaaggtgtgggcgctgtgggaggctggcacgctttggaaggacatggagctagtgaggtgagctggagagcagatgagaagcagggtgagtgaaaatcagagctgggtacctgtgggcattgaatgatacggtggagggggaattgtgagggagcaatgaaatcgcggtggtccaatttggggagaggctcagcaaactcgggcaagatgggtgtaccgcgtttccaatgtgaagagccgaaagcaggacagggaaggatgctgtgtgggggacagggatagggaaaggctgaggggcagaggaaactggggtgctgagagttggtagcctgcccaccactccccacccccagtcccagtcccactcgtacctgacggtggcctcacggccccagctgcctgccccacgagcagctgccacaccagcccggactgtcagcgcaggcccatccagatggaggcctcagcccagtgcccgcctgaccggtttgcctgcctgtccccgccccttccccagcgcctgcctgtcccagtgctctctgctctcgaggactgggactccgactggactcagtcttgtgtccccatccctggtaaggaacggagatgcatcccgcagcactgcctcaatctccttaaggcagccacaggcccaggcacttctgctggtgtgggggggacagggagctgggatgccagctcctccgtggcccaggtatgtgaccttgggcaggtgacttcactctccgagccatggcttcctcattgctgagtgggcacctgcctctcgtggctgtcgcgagggaggcactgggtgggagtcccctcagctcagggcctggcgcacctgacccggggctgtgctgacccatttacctggcgctgttctaaatggatgtccataggacaagggcaacagcacacacatcaaggcttgctacaccatagccccgtcttcctctccaccacccagggggccaggtgtgatgcccgcttcacagatgaggacactgaggcccagagaagtgaagtcctcggccccagggcacacagaggcagggcggggatttggaagcagtcagtggttgctactcccaggctcgccaaggctctgtctcctgccctcggggccagcactcagtgactgcctccccacagatgccctctgaggggtgagggccggggtaaggctgggcaggagatgccctgaaggcccctcggctctctggggccccggctccctgtggctgctggcgtaacggggtcaacagttgcttccctgacagacggggtgctccgatggggatgggggaggcagccccagaacagtgcccaggacaagataaagggaacccacccagccctgagttctgcccaggtgaccaaacactgctccctacggccagagccagggcccttcctgcgacctgggaccccgtctcctcccccacccttcaagccggttgctctgggaaggttcctccctggcccaccagggaggcggggctggcatctgagcgtgggcatctgcagtgggcctccgtgccaaccccccacacccccggcccgatcatgaagcgtggcccaatgtaaatgagccgtctccgcaggacgagattgccccgggctgggagcacagtggccaggaggctgctggacactagggggagcaggcgtttggggagtgggccaggcgggcagcactgcagaggcagacacaggacacagctacactcagccaggtggaataggaaggggtgacccaggcagggcctgacggggtgactggaccccactctacaggggaggttctttagcaaggggcccctttctcatcccatttggggttcacccccagccttggtgggcagctctgagcctggggcacttacccatgtcaggcagcgggcggcgaagcccaggagtccccagatgctacagatgcgagcggggtgggagggggcagcataagggccactctgcccagggacgggcagcaggagtgcgtaggggccgcgtgtgtccatgggggtgtctggcctccccctaccccatgcatccccagccctggcagccccagcccgacctggcctacactccgggcactcccagccctgctccccaggaagacgctccgttctgtgcacatcgccgggcagagggcagccccagacttgttgacttggcagaggtgccagtaaggccgcccatgccggaggccagcatccctctgccaggagcacggggagggagggagtggagggggacgtggcaggggagggaaggtctgaggggcatgggagccagagagggtacccactcccctgcaggacctgtgacagtcggtccacagatcctcccccactgctctgagtcagattccacacacacagcctttattgagcagctactgggcagtgacgctgccgaggcgggaatcccaccacagtcctgaccgcagctgggacccctttgcctcctctgacacccccacctcaatttgatacccacttcctgagcaaatgtgacccctagggcctgggattcccaagaccaccccgaaatgcagcggccccaccgtctcctgaggccggtgaggccaggggcagcagtgcggctcagcaggtgcgaggcaggcttaggatttcggaatcaccacctggaacttacctggaagagaaggcctggcttaggcttgaggatgggatgggggaggcagagggcacctggacggctcttaggcgctcacccccgtcctgcactgacaccccagtggctaggttgggctgtttcctcccgcccacggggccgcatccctgagctgtgtgagtaaccaggagcatgagggccacggatgtggccccagggaagcgcccggcacgggcttctgtggtatgcattgctcggtcctaccccacgggggccccgggggcccccatgagtgggcctggggaaccggcagaggcaaaataactgaaggtgggggaggtggtggggcaggctgtccccaggcaggaatggggctccagcttgtctgacagaggacacccagtcaggcaggctgcaagttccctggagcctgccgtcgcccccatcgaaggatcagtgaggataacttctattgcgtccacctcggctcccatgctgggaaacgatgttcaaaaccgccagacagttctctctgcagggctggcgacgtcacggagccaggggcacagatgggcctgcaccagccgtgtggctgagcaggtgacttaaaactgggcctgcctcccaggcacacacacaggagtggggctggaactctgaagcccccagcaactcaagggatgagaagaatccccccaccccccatgactcacagacgggcagggctgccacggaggcggtgaccacgctctcaatgcccagggtatagagggcgccgcgcaggaggccgcaggtgaaggccaggaactgaggagggaacacagaccagcatgggaagagaggggaggccagcacccgaggtctggggcaccccttaggcctggggaaaggcctgatgtgggatggggctgggtaaacaggaggaagggaggtgtggacaaggccccagctccccccataccttgggtgcttcctccagatactgcaggccagaggccatcgggaggaggagggggaagctgttgtcttgcaggacgtaggtcccctgggggagaggagaggctggtgggtggggtcggggcctgtacatttgaagcgcagggagggtaagcaggaacccaggtcttagattgggctgaggttgggaaggcccccttcctgagaaccactggagtcacagccttggcctccagtgctctggtagggcccagggcttccaaacttggagtgggtgcctgtgccctggggagtgtgggtcctgccctcgcctcccagggttgtgcagaaaagctggggacccggcccaggaagatgcagaagggcaggtacagcctgggtgtcactgggggactagaccagcttgggacaagcagcatcacactgggggtagggcaggcagccaccaggggctttctgcccatgcatggctcactcctggtaggctggagaagttccggaaacaccccctatgccccagcgcagcctcctggcttcccttagaggatcagacagagcaagagctgcggccgcctgtgggaaagctctgggcgggtcccggcagccgctgctctggcgccgggggattcccctcccactctcttggtcttgccctcaggaggaagctggacgggcaggccggggtgctcccacctggtgattggtgcgcaggctgtccatctgcttctggaacaccgccacccacaggtctttgcacaagaacttgaggacatccagctcctccctgaaggccagcgtctcccggggcagcctggtggggcagtaccaagctgaggccgtggggccaggccaggaagagggaggaagacaggcccgactcctgcatggagcaatgcaaccctccccgcccggggcctgcccagccctgccagccaggctgggggagagcaggaggggccgcgctcacctctcgcctagagcctggcccacacggaaccccataccctccaggaccgacaggctcatcttctgtccctagaaggccaggggagagatgctcaggggcccttagccaccacgaacccggggccacccagggggggacctgccaggggacccaaagaccaacttgctggtgctcgtcagttcaggggtgagcagggaggggctctggcacagcccggccagggcaggggcaggcctctagggtgctggggctccctcacccacctctgcagaccttgcaggctctctggatccccagatcatcagcccccaagaaccagctcccccttccctcaggaacaatgggggtcttccccaggctcccttcctcctccatgacttttcctgataacccccatgacaggctgcacgtgctttcagcgcgaaccctcacaatgccctgggaagtgggcgctgcgactccaccaagatgctccaggtgacctgcccaagggctggaggctgggccacaggaaagggggctgtggaagtcaaccatgatcatcatgccttataatattggccaagatccctggggaacacgtggaagctcgggacaggcagatcttcgtttgggtgctcgaaaaggacagtggctgccatgtagtgtctggagggtaggccagggtccatacaggaggggactgtgctggcagaggcaggccccaggtaggagggctgcactcggtgtctgtccacgtgcctgtgtgtgtggagggcatggctggaggagaggagatgctcatggatttttttttttttaagagatggagtctagcttcattgcccaggctggaatgcagtggcccaatctctgactcactgcaacctccgcctcccgggttctagcaattctcctgcctcagcctccagagtagctgggactacagggatacgccaccacaccctactaattttttgtatttcattagagacagggtttcactgtgttgcc[134 bp omitted]tagagtgcagtggtgcaatgctggctcactgcaacctccgcctcccgggttcaaacaattctcctgcctcagcctcccgagtagctgggattacaggcctgtgtgccaccacacccggctaatttttgtatttttggtagagatggggtttcaccatgttggccaggctggtctcaaactcctagcctcaagtgatccgcccgccttggcctcccaaagtgctgggattacaggcaaaagccactgcacctggccatggatctttttttttttttttttcattcgggtgttttgctgcaagcagaggaagggaggaggcccagactggggggcaccagaaatcccaggacggctggggcgtgaggcgccaggtttttcagagaaagcctggcagagcagaagtgggggaacagaggcggcaggtgtgcagccctgagctgaaggaagctcaccctcccgctggctgctctcaggagcctgcagtcaccaggcctgagccctgcagccctccctctcctgcccttgacccccaccttcccttgggaatggcagctaccgcctcctccctccagggctgcaccatcagcgcagccatccgaatggggatgcgaattctctgcttggctccagccctggagcgggtctcccagcctggagagcgtgtccgaggaaggcttcttgcagcctgcgggcccagctgcctccatccctccctcaccctctcctctgccccctgaggacattcgctcagacttctgagcctttgtaccgacttccttcccttcctccctcccagcttgcgtccccagccctgcccactgcacactgtccctggatgaggacacagctctgtgaaggtggggacccaggctgaccaattcacatccggccttcagcagccaacacagagcttggcatgtgggtggtgcttaacagactggctgatgagacaacgtgcatcaacaaaggacaccgtaagtccttacctaatgctgtcaacaggctcttggaaactatggctttaagcaaaatgacatatgatgaaaccaatttcacgcaggttaattaacataaacaagagtgaagttccaatgccatatttctggtacaaacacatcaccaaacttctaaataaggatgaaaacacttgaaatattaaacactgaaataaatgtgagctatacatacgtttaagaaagattaggccgggcgcagtggctcactcctgtaattccagcactttgggaggtcggagtttcgctcttgttgcccaggctggagtgcaacggcgcgatctcagctcaccacaacctctgcctcccgggttcaagtgaatctcctgcctcagcctccccagtagctgggattacaggcatgagccaccacgcccggttaattttgtatttttagtagagacagggtttctt[135 bp omitted]tggcgaaaccccttctctacaaaaaatacaaaagttagccaggtgtggtggcatgcacccgtgtcccagctacttgggaagctgaggcaggaggatcatctgagcccaggaggtcgctactgcagtgagc[140 bp omitted]tccgcctcccgggttcacgccattctcctgcctcagcctcctgagtagctggcactataggcacccgccaccacgcccagctaatttttttgtatttttagcagggacggggtttcaccatgttagccaggatggtcttgatctcctgacctcgtgattcacccacctcggcctcccaaagtgctgggattataggcgtgagccaccgcgcccggccctgaccctgtcttaaaaaataaataaaaaacaaaaaaccagtaagacatttactcgcttcctccagctcagggtcctgggtggccagagcccgtcctggcagggccaaaagcaggaatggaccctggacagaacgccatcccatcacagggcgcacacgggcccacactcactcacactgggcccacggagacccgggagctcacccagcggacacatcccaaggatgcacaaggaaaggagagcccagaggaacttgcaccagcacagggagaacccacaaccaccacccagacaatggtcccgggaatcattattttttcctcatcaatgtcacaacaaaatgttattccaggaccggcatactgtgtggcaggcgttttctacagccttcttgttttacctttccagcctcacagaaggctgtaattccaggtggaaacaggggctctgaggttaagaagaacccatccaaggcaccctcagcacgggactgtctttcacaccccagcaggtccagataggagggtgggtggggtgacagccatggctgttgagggcctcacggaggtgaggagcgctgggaatggcgggggggcctgagctgaggtcgcccatatctgaagccaaggtggcccttcctctgcctggccccttgccaggcctcgccctcatgggtgacaacgacacggcttcctgttgcactgtctccctctggtgtcaccatctgctttcctccagtgtcctcaggcacagcagggccggccacacagcagaggctcatggaaggggccgatgactgcaggagacgggcaggtgtgtgtgagagacagagtgggaagagacccctgcccgtgggtccttcatggcagcactaccagcggcgcaggtgcagagccaccgcctgggtccagatccgccccagcacttaccagtgtgggacctgggccaatggctgaatacctgtgcctcagtttcctcatgtaaaaaagagggtcattttgtttgtttttgagatagggtctcattctgtcacccaggctggagtgcaatggcacgatcttggctcactgcagcctctacctcctgggttcaggtgatcctcctacctctgcctcccaagtagctgggactacaggtgtgagccactgcgtccagcccaaaggaggggaatattaatggcagctacctccaggatcctcacaaggagtaagggttggtaaaggcaacctgagtacttcaaggcagttccgggagccttacttattgcattcacagcctccacatctgtcaaacaaggagacggccccagccaatgagggatgaagcccttggctggaggagaaccccaggaaggaagggggtctgttctgtgggctcctgtagccagcacctagaacagcccgggcgagagctcgctgcctggtagctgcggctcccgtgtcacctcctcccacagcgaagctcctggaggcagggcccaggctgcactctgagggaacacgtctgtgtccacagcaaagctcccagaggcagggccaggctgcactctggtggaacacgtctgtgtccccactcgctaagggctcctttatgtccctccctcattcatgccacagacatttcctagtgtcctccaggagctcacctaccttgcctggcagggttgacaggtgcccaaatgatgccaactgacaatctgggaagggctgggagactgagtgcaaggggcccgggcagtgcagtgcagagcctgccctccaggagggggccggaggtggcaggtattccaagcaaagggcatgtgccaaggcaggggtgagaggcggggaagggaaggggccctcagagtgggctgcagagggggcattttcccctgcaggcaagtgcagccaacctgagggtcaacgcaggccacgttgcctgaatgccagccacagtgggccacagactcagtccctgccctgctggagctggcgtttcacccggggaatgggcaaaggtgcaatggccggcttcactatgctcacagcgactgccaagagggaggcaggtgtgctgcgagggtgcactcccacccctaggaagcaccccgactgtgctgagcctgagggaagagggggagttcaacagcaggagtgggctgtgaaggcacaccaggcccaggtcacagccaggacggcagcccccggaggggtgagctgggggagagagtcagcagggtccttcagccaggccaggagcgtggagtctgaaggggttccagcaagttcagcttttcccttcatgaacttcacactgcctgggtttgaatctcggccccgccactcactggctctgtgaccttgggcagattagccaaccatcccgtgcctcagtttccccacatgtgccatggggctaatggcagtacctgctcacagtggtggtgtgactggcaggtggcaacagctggatacacggctgtgtgactgctggccccactgtacccagccctggacaggggccattcagatcctggctgaactgaaaagggctgtggggaatcacagcaaaagggaggggccgaggaggagcaggaggcagggaagaaagggcggaggaggaagggagaagcctccacccacctcatcacagcgagacctggtggtgtccatgcccatgtcactgcaaaagctcttcagaggttaggggtttatctttcttaaaaacagaaggggctgggcgcgggggctcttgcctgtaatcccagcactttgggaagccaaggcgggaggatcacttgaggttaggagtttgagaccagcctggccaacatggcaaaaccctgtctctactgaaaatacaaaaattagccgggcgtggtggcgcacgcctataatcccagctattcaggaggctgagccaccaggatcgcttgaacccgggaggcagaggtttcagtgagctgagatcacaccaacacattccagcctgggtgacagagcgagactcagtcacaaaacaaaacaaaacaaaacaaaacaaaacaaaacagaagggctggccagacagagactctcccattcatatgaatctgccagagcccagcccagagccggtgcatttctggggctccccacgcctgcctctgctgagtttacacacagaccggatgaaaggaaaggtggaagggaagtcttatcagtgtcggtgctaatgacatccaccacacaggaaggatcaatcagacacaaagcagagttcctggaaatgaacaaatatggtggccaaaatcaacactttttaacaagggaactgaataacagagaaacctgtaagacagataacacctcccagaagaaaaacaggagggaggaaaaaatgagagaaaagctacaggatgcttggaagagatgcaggaagtctaatattccctgtggtgcctacaggacatacagggaacgatgcaggagaagaaatcatcagagagatcacaggagaaaaatgtcctgagctaaaggaagattcacacgtccagactgaagccaaggggttgagctccaaggaggatgaacggaaaaagcaaaccaaagcccctttagacacttgggagctcctggtctcagacaatgggtgacagcgccttagctctttactacatgcactcaggggaatcctctctttgcccaaaggcttcccttgtcttcaaagcctctgaggtagaaaagccacggctgcttcctccaagggcttctcctccttagagaacaaaggccttcctggcccctctggccggtcctccagttcacaacctgtgacagcccaggagaatggccacaaataaccaccgtaccaggcaggataggaggtcacaaaagccctacacactggctgtggctcctgggcacctgtgctgtggggacagagatgaaggagccaccatccctgtcctcaaggagctctgaagctggtgggaaaggcggcctgtgctacccagaagccctggggccagaagcctgagttctaattttgcctttaagagaacattctgccctgaactgggagggaggcgggtgggggccatgtgctccaccccttcctgtctcttgtgtctgccctacccctcgattgttctctaggcacctgctagctcctgggcagaggctgaccctgttcaacgcccacctgctgagccactctgtgccaggcccaggggtgtggtggggaacccagggaaggagcagccctggttaagaaaagcacacagacagaagtgctggcacacagatgggtgagtgaggggtgggtgcgagaagcctgcaggacttccctgctgttgccctcaactctcctccctggtccagcaaggcatcctgagcaagtccagatcctgcctctgcccactcagaactccccatcctgtcccctggcccagcccggaaggttgagcccaccacagcctctgccttaagctcctgcaacagcggggcccttcccaggccaatctccatccagtccattcctgtggccagggagacatttctagaatgtaaatctgagccaggcgcacctcagtttaaacccggctatggctcccactgccttcgggatggagccccagttcccaggagggcctcgctggagctcccagccacagatgctcaggacggtgttccgggcagggacctatctgacagccgctccgcccgccccacaccctcctcagataaggggctgcccaagtgcactctcggggtgtggtggatggaggcctggcgcagcagggctattctcggggcgcctcgggcctggtctcagacaatgggtgacagcgccttagctctttactacatgcactcaggggaatcctctctttgcccaaaggcttcccttgtcttcaaagcctctgaggtagaaaagccacggctgcttcctccaagggcttctcctccttagagaacaaaggccttcctggcccctctggccggtcctccagttcacaacctgtgacagcccaggagaatggccacaaataaccaccgtaccaggcaggataggaggtcacaaaagccctacacactggctgtggctcctgggcacctgtgctgtggggacagagatgaaggagccaccatccctgtcctcaaggagctctgaagctggtgggaaaggcggcctgcgctacccagaagccctggggccagaagcctgagttctaattttgcctttgagtcttgctgaaccacctcgaaatcccttcctctaccaagcacagggtccctcctctgtgaatcgggagggctgtcctgaggactaaatgcagtcaacactgtgcaagtactgcacagacgccctcaggaaacgggaggcctgtctggttcagaggaacccttttgggccaaagagaaggaatggagagaggaggtggggccaataaagagaaaggactgaggaagccgtttctcatgacaggccccctgaaaaacggggctccccaggaggaaggagtgaggggaaacgatgcagttctcacccctagctgcagcgagagccacctgggagctttctgaggcctgacactcaggcctcaccccaaccgggttcgtcagagtctctggtgtgggactccagcatcggaatgtagtggcagctgggtagggaacccctgcccaaggtcccaggcacattcgtgtgctctgaaaggctggtggtgagcagagctgagtaagccagtttcccacactcgcttgaccacagaaacccattaaaatccttcccagggcaaatgctgggaaatgcaagtgagagtttacagcacaggctttggaagtgggaggcctggtcgcgctcctgactctgccacttgagagcaaggaactccgtccatcaaagcctccgccgcctcatctgtaaatcggggaggaccatgccaacctctctgggtcatcagaagatcaaatgaaatcaagagtgagaagccatgagtgcacacaggaagcactcatatgaggggagggagggaagagctagcactgctcataagccaaatgaatcccagtccccacccatccccacctgccacggcacaggctctgcattcacctcctcaacacgtccacactgaggacccactacgagccaggacatccagtggtcatcaatacacacccaggcccatcccgcacaaagtacactccggctgggggagacgcatgtgaattaaaggatcatacagatacacaattcagacgcatcctggcagggcgtgctggctcacacctgtaatcccaggtgtgagtttttgggaggctgaggccagaggatcgcttgggcccaggagttcaaggtcagcctgggcaacattgtgaaaacctatctctacaaaaaatttaaaaattagcagggtatggttgtgtgcacctgtactcctagctactcaggaggctgaggtgggaggatcacttgagcccaggagtgtgaggctacagtgaactatgatcatgctactgcactcc[224 bp omitted]aggccaaggcaggcagatcacaaggtcaggagatcgagaccatcatggctaacacagtgaaactctgtctctactaaaaatacaaaaaattagccgggcgtg[346 bp omitted]agcctaccaagaaaaaagtgcgagagggagaccaggagaatgtataaaggagatccaaatttgactgggggctcagggaaggcatccctgaggaagggattgttacgctaagatctgaaggattaatagttgttagcatggtgaagatgtgacaggtggaatgggctgggagaagggagcaggctcatttcacaggagagcggaaagcactggaccagggcagaggaggggccacgtgagaaaggtatttagactgactgggcagagcctgggggagggctgcaggtgagggagacaaggcaggtgttgggactccagggtttctcgtttgaaagccaggaaggatatggagtgttgggacattattacccacccccaggctgatgcatactccctgggccatgctgtatcttcctcatagcagttacacaatgtaccagacactttactcatttacttgtctgtctcctccaatgatgacaaagctccaagagtccaaaaatttttgatggttcactgagtaatccccatgtttttttagagacagggtctcactctatcacccaggctggagtgcagtggcatgatcatagctcactgcagccttgaactcctgggcccaggcaatcctcccacctcagcctcccgagttcttggtagtataggcatgtgtcatcacgcccagctaattttaaaaatttcttggccaggcacagtggctcacacctgtaatcccagcactttggaagcccgaggcgggcagatcacgaggtcagatcaaaaccatcctggctaacatggtgaaaccccatctctactaaaaatacaaaaaaaaaaaacaaaattagccgggtgtggtggcaggcacctgtagtcccaactactcaggaggctgcgg[132 bp omitted]agaggtgaggtcttgctatgttgcccaggctagtcttgaacggtgggcctcaagtgatcctcccacctctgcttcctgagtacctgggattacaggtgcaagtcgccacatctggctaaatgcatttttgatttatgatgttttaaacttatgacaggtttgtatctgtatatcgagatggtaacaagcaacatcctccct[164 bp omitted]tactaaaaaaaaaaaaaaattggccgggtgcagtggctcacgcctgtaatcctagcactttgggaggccaagatgggcagatcacgaggtcagaagatggagaccatcctggctaacagtgaaaacccgtctctactaaaaaaaataataataatacaaaaaattagccaggtgtggtggcgccagcagcgcttgtggtcccagctacttgggaggctgagaagtgggatgatcgcttgagcccaggaggtcgaggcagcagtgagccatgactgcatcactgcactccagccagcctgggcgaccgagcaggatgcgcgtgcgcgcacacacacacacacacacacacacacagtcccgggccagtcacggtagttcacgcctgtaatcctagcactttgggaggcccaggcgggagaatcacttgagcctaggggttcaagaccagcctaggcaacatggcaaaaccccattatctcttttttttttttcctgagacaagtctcgctctgtcgcctaggctggagtgcaatggcacaatcttggctcactgcaacctccgcctcccaggttcaagccattctcctgtctcagcctcccgagtagctgggattacaggtacccgccatcatgctcggctaatttttgtagacacggggtttcaccatggccaggctggtcttgaactcctgacctcaggtgatccgacggcctcggcctcccaaagtgctgggagctacagcgcccagccggcatatttcattttattatttgactcccctagtgaaatgtaagcttcacaaggaagggattctgtcttagaacggtgcctggaatacaacagacgctcaataagtgggtgtcgaataaataaatgtcccacgctgaggcttaggtacgttatgatactcattttacaaaagagaaaactaggacacacaaagattaagtcattgggtcgcacacctagtaagtgggggaggcgagtcctcagcacacgcccaataacagcattattatgattactagccgcttactcaggccttgagctaagtgctttaccctgaatcatcgcgctcaatttagcaataaccccgagccggcaccgtcgcgaacgccactttccaaaggaggaagccagggccagacgttgccctgcaaggccggggctgggccgggttcgaacccggacgcctgacgcgccctccgctctcccagaggcgttaccttggtggcccccgcttcctccccacggagcccggcgctcacccccgggccggggtcggggtcgtgagcccacagctcagccaccatctccgtgtgaagaaactcaaacaacacagtatccgccatgccccctcctcgcacgcctaaagatgcgcccagcgcttccagctctcattggccaggcttggtaagccacgcctcttgcgtcatggcgcgagccctcctactccggcttccattggtgttttagactagccccgcctccccgccccggactcaggtggtgtgcgcgtgagcctgggacactagggggcgggcctacgccttctctggccacatgtggcaacatcttctgctcttactgccgtcccttccctatttccgggttctcgagcattcctattggccaaattactggttacacgtgacatactcggcttttaaaatccctattggtccactccagactttcctcgtcgcacaacctggaagagccggcccagctgtttctctattggcggttcctccattcatgtgactcttctgcacgctcactcaaagctgatgctgagaacttgcttcctgattggtagccgggcgaatccacgtgacttggccgctaatgcccgcccaacccgctcccctattggttgaaatcacagcccttcagctgccacggtgagaacgcagcactcgggttaggaagcggatctcgcaagctccgagcgtcagctgccgggtacggtctttggcgttagcgcttctcccatcccatgagtgcccccagcagagtccagtcggactgtcatcctttctgcgactctggcgctggtcccgagcagctcacgggcccgtgtgcttccgggtctgagattggcatggtggaccaggtggagggtgtggcctctactaggaggcaaattcgtaaagacctcggcttgggactccgggaactcgggccccagatccttgttcgagctggtcttcagtttccccatctgtacgctgaagagcctggggtccagtaacccccatcatcacccagtttacagaagaggaaactgaggcccagacggggagcagctgacaccaagtcgttaagagaatcagcgaaggggctgggaatccaggacctgcgccttttacccaccgcggcgccggtctcacgtgcagtcccttcgctcttctcccctagttcggtgccatggcgtcccagggtcgtcggcggaggcccctgcggaggccggagacggtggtgccgggggaggcgaccgagacggattccgagcgctctgcgtcctcgtcggaggaggaggagctgtacctgggtccttcgggcccgacgcgcggccgccccacggggctgcgggtggctggggaagccgcggagaccgactcggagccggagccggagccggaaccgacggccgcgccgagggacctgcctccactcgtggtgcagcgggaatcggcggaggaggcctggggcacggaggaggccccggcgcccgcccccgcgcgctcgctcctgcaacttcggctggcggagagccaggcgcggctggaccacgacgtggcggccgccgtgagcggtgtctaccgccgtgcaggccgcgacgtggccgccctggctagtaggctggcggcagcccaggcggcggggctggcggcggcccacagcgtgcgcctggcgcgcggggacctttgtgcgctggccgagcgtctggacatcgtggctggctgccgcctgctgccggacatccgcggcgtgccagggaccgagcctgagaaagacccggggccgcgggcctagccatgattctacttcccaacctgactgcaatttgggggtaggccttgctgcctctgggacctgactctgtctcctgtgtctcttatcaccccccacccccgctcccatcttggtgtcacccatgggggctaatccggtccccttggataatgctttatattggatatagttcaacccctactgcggagaccagggccccactatccttagatctggttcctctcccgatcctgaccctgccgcctggttctgagccttcccctggggcttggctccagcctttgttacatagttgctccttaatctgtttccaccctgggggctcaccaattttttttttttttttttttttttggagacagggtgtttatctgtcacccaggctagagtgcagtggcgggattactgctcactgcaacctcgacctcctgggctcaagtgatcctcccagctcagccttcaagagtagctgggactgcagacctgcaccaccacgtccagctgcccggttaatttttttctgtcggtttgaagaggggagaaggtctcactatgttgcccaggcttgtctcaaactcccgggctcaagcaatcctcccactgtggcgtcccaaagtgctggggttacaggtgtgagccaccacacactgggctctgctctgcctttctgagtttggtttctgcttatggtggggagcttgttcccgttcttcccacaagaacccaggatgtggcacagcttccctgccgtcttccttcactcagttggctacgcctcccatcctagctccacttccagaactgccttcaccctaggctgggtccttgttttgtttttagagacagggtctcactgtgtctcccaggctggagtacagtggcgtgatctcggctcactgccacctccacctcccgagttcaagcgattctcctgcctcagcctcccgagtagctaggattacaggcatgcaccaccacgcctggctactttttatatttttagtagagatgaggtttcaccttgttggccaggctggtctcgaactcctggcctcaggtgatccacccgcctcacctcctaaaatgctgggattacaggcgtgggccactgcgcctagccagctgggtccttgttctgctgcccaagcttggccctggttccgtgtgctggttctactttttgttctcccatctgcctcctgcctcctcccctttgagcttagccccgccctctcagcctgatttctgtttcccaagtccagcagtgtcgtgggataggttttgctttcttttactgtctccatcctacttacacctccctgatcctggggtctggggactccccatggtttccttccttctgcaggcccaaaatgatggcccctcttaacccaaggcaggggatcttcctcccaactccctggaccaaggtggcatttcctgcacacccctccaggccaagatgatgctcgctctcaactctgtaggccaaggtggcgtctcctcttgactctccagacctaaagtgacacccttcaggcacttcgggcccaattcagcccagtcctggtgctttcagcgccagatgacagcactttgcagataagaacgatatgatgtgtggatttcactacatttggctcctggatgctataaaaggacttggatttctgacttggctcagggactggggttagcagtctctttctgctccttttcacctgtgttttcttccgatcccagctctggtccctcagccgcattcatatttactctcctctcccagcctgatatccctgtccctcatctcaacccgaagccaagatctgagcccccaagatggagaatggggaggagctttttatggcggactgattaaaactcttaagcatttacccttatggttagttccttttgtttccctatctaagctaagggtgagttggttgatttctctgagaatgggggtcccgagacctccatgcctggcttatggaaggtgaagctgtagttgggaaatcaggggccctagatttttgccctggttctgtatttactcgtattttattaattcaacacacacgttttgggtacctgacctgtgctgcggctaggggtatagcacccagtccctgccctcacagaggtcgcagtccagtgggagaaacagtaataagatgttctcatagatagttctagtaatcataatttatagtttaatttttaaaaatagagatgatagcctggccaacatggtgaaaccctgtagttattaaaaatacaaaaattttgggcgatgtatcacgcctgtaatcctagcactttgggaggccgaggcacgtgctagtaattccagctactcagggagctggggcatgagaatcgcttgaaccctggaggcagaggttgaagtgacccaagatcgtgccactgcactccagcccgagcgacagagcaggactctgtctcaaaaataaataggccaggcgcagttacgcatgtctttaatcccagcactttgggagatcgaggtaggcagatcacctgaggtcaggagttctagaccagcctggccaacatggtgaaactctatctccactaaaaatacattagccaggcgtggtggcacatgcctgtaatcccagctactcgggaggctgaggcaggagaatcgcttgagcccaggaggtggaggttacagtgagctgagatcatgccactgcactccatcctgggtgagagtgagactccatctcaaaaataaataaaaaataattaattttaaaaaataaaatagagacgagctctcacaatgttgcccaagttggtcttgaacttctgagctcaagggattctcctgtcttgacctcccaaagggctaggattacaggcatgagccactgcacccagccataatttataatttagatacaattttcttggcaccatgattagagccatgaagaagtaaaggagctttatgaaggtggagcgggatccacctgacctaatctgggcgggagagaggaagtgatgagtggtgctggagctgagcccggaaggtggaagtaggtgaaatgggagtagggtgaagagttgcagacagggagaacagcatatgcgagggccctgaggcagaagggaaagggaccataacctgtttaacagaagaagatgatttctgctctccacctagaatggagaagtgtggggtggttgtggggcaggggggtgctgagtgcagtaccagaaggggccagataaaggtgagctttaaaaaaattgtattattggctgtgcgcagtggctcacgcctgtaattccagcactttgggaggtcgaggcaggcagatcacctgaagtcaggagttcgagaccagcctggccaacgtggtgaaaccctgtctctactgaaaatataaaaattaggcatggtggcacatgcctgtaatcccagctactcaggaggctgaggcaggagaatcgcttgaacccgggaggcagcagttgcagtgagccaagattgcgccactgcactccagcccaggggacagagcaagactctgtctcaaaaaaaaaaaaaagtaggtgcggatcaaccagcatctcctccctcctgagcactccctccagctccccttccacacctagggcgagtggatcacaattcaaagaggatgatctcccagaacttcccttttctttttcttttcttttctttttttttttttttttttttgatatggagtctcactctgtcgttcaggctggagtgcagtggcgagatctcagctcactgcaacctccacctcccaggtttaagcaattctcctgcttcagcctcctgagtagctgggattataggcacgtgccaccatgcccagctagtttttctatttttttttctttttagtagagatgaggtttcaccatattggccaggctggtctcaaactcctgaccttgtgatctgcctgcctctgcctcccaaagtgctgggattacaggcatgagccaccacacctggtcaggacttcccttttcaatgagtttagcgagagtccctgaggagctgagctgcctgggagagtggcagcttagtggtctcatggtggacttccagccctggagcacagagcttccctcactccttaaactccagctcactagccaggcctggctttcagcccctttctttctttttccctccctccttccttccttcctttctttcggtggggtctcactattttgcacaggctggtcttgaactcctggcctcaatggatcttcccaccttggcatggcagggatgggaatctgattggagagggtacaagagggtgtggaaggagagccagagaccatcctctttgcaatgttgagtgaaggggtgggatggtaagaaatggggaagtggcagtgcatggtggcttacacctgtaatcccagcaatttgggaagccaaggtgaaagcactgattgagcccaggagtttgagaccagcctgggcaatatagcgagaccccatctctacaaaaaatacaaaaactagctgagcgtggtggtgtgcgcctgtggtcccagctactcgtgaggctgagatggaagaatcacttgagcccaggaggtcgaggctgcagtgagccatgattgtgccattgcactcgagc[142 bp omitted]aaaccccatctgtactaaaaatacaaaaaattagctgggcacggtggcgggcacttgtggtccaagctactcgggaggctgaggcaggagaatggcgtgaacccgggaggtggagcgtgcggtgagccaagatagcgccactgcagtctggcctgggtgaaagagcgagactctgtctcaaacaaaaaaaaaaaaaaaaaaaaaaaaaaaaggaaggaagggagggagggaaggagggaccgactggggaagtacctagatggggaagatgggaggggtcatggcatgtttgtatgctgctgggagtatttcagaagagggagaagtcgtgatacaggggaaaggtgggagaaaagccagaccattgtcctgcagtaggtaagaagggaggaggagatagcccccaaggggaagggcaacactggggtaagagagactatttgtggctagttgcaagtcactgggtagtgatgaccactctggtcatcactgcctgggaactggtctgtcacccccactggactgttggccccatgaggacggggctgaggctgtcttggccagggccagctaacccagggaaaccacagagtagatactgggcaaattgtttgttgaatgaatgaatggccttcacaccatcacacggcatcagcctctcagatgcatggagctgttgagacgttcgggcacagcctccctccaaaggtgatgggcactcggtcccacataacacatcaccctcagatgtgcaggatgagagggtcagacatgcaccaaaatgctaataacacccactccacaaatatttgctaaccacatttcaaggggaaaggcattcaaggcagaaagaatagcatgtgcaaagaaccagaggcaggaaaatcctgggggtgcttgtttgggcgagatgaattgtctgttgtgcatggactgctatagaggggcctttggcaggagggagagctgaagactcagtcaagagccaggccacacagggccagaatgaggagcagggctttgtcccaagggccctggggagccaaggcaagttccaagcaggagagaggcagggacgagtttgtgctttagcaagagatacctagatgggtcaggtgcggtggctcatgcctgtaatcccaggcctttggaggccaaggcagatggatcacctgaggtcagaagttcgaaaccagcctggccaacatggtgaaacccccgtctctactgacaatacaaaaatcattctgggcgtggtggtgtgcacctgtaattccagctactcaggaggctgaggcgggagaatcacttaaacctgggaggcgaacattgcagtgagccaagattgcgccactgcactccagcctgggcaacacagcaagactctgtctcaaaataaaaaaaaagaaacctctggctactgagtggagggtgcatgggagggggtgagactgggtctgtcctggtcactctgtgtccccagcaccactagcaaagagcaggtgcacagtaaacacattttgaatgaagatatgaatgaaggaagtggcaaacacttgaattattggacttctgttgtcactgagaataaaagccaaatcgtatattattattattattattttagagatgggatctcactacgttgctcaggctggtcttgaactcctgggctcaagcaatcctcctacctcggcctcctaaagtgagccaccatgcccagcctgtaatcccagtactttgggaggctgaggcaggcagatcacctgaggtcagtagttcgaaaccagcctggccaacacggtgaaaccgtgtctctactaaaaatacaaaaattagtccagtgtggtggcacgcacctgtaatcccagctactcaggaggctgaggcagaatgatcacttgaacctgggacgtggaggttgcagtgagcagagatcatgcaactgcactccggcctgggcgatagagtgagactccgtctcaacaacaacaacaaaaaaaaagtgctagggttacaggcatgagccaccacacccagcctcaacaccacagtctttactgggacattggaggccctatgatctggtcctgggtccatctcgctgagctcatagacaactggccacttcactgagtaatactggactctgggctgtcctctaagctgccagacagagcctttgcaattttgtttttctctggcactcagctctgtatgggcagtgcctatagcaacattgtataacaggcagtcagcaggcagtcactatttgttgacttaatgaatgaatcccctgcagctccactggagaggtctgaacatcatcctcatcagtagaaacctgagctagttggagcaggaggcaaaggagatgggtggaggccaggaggaccaggctgggagaattccaggatagggactggggcaggggtcagggtcagggtcaggggctggagctgatgtccagccaagagcagaatctagaatggaactgggacagggatgggggctggggccatgggagggacagggccaggggctagggaggggacacgattgggggcgacctcggttaagggcctgactccccaacacctctctttccagagcggcttcacagcaggaccacaggagtcattgtggccaacttcgctggaggcttggagatctttggggccattaaggcagagctgcagggcctagagattgagatgctgggtatgtccccacacctgcttggggagccccgccaagctgcaggcatcgcacactgacccagggccctttgtgatcacccttcacctggccccatctggtctccttgggactgttggggtgacacagcctgttccctctcgcccagtgaacaatgtggcatgctgtatgcgcagggacgcttgaggaagctgctcgactgtgagaatgtcgccagagtgaaacagagtcctagcccacctggcacctcttcctccaactctttactgccctctgttggaaaactcgcgtaatatacaaaggtaaagtcctcacttgggtacctgtgggggattccttccaggacccccactgatgccccagaccctaatacaaaatggcctagtatgtgcacataacctatgcataccctcccgtgcactttatttttttttaattttttaattttttgtgggtacatagtagatgtatatatttatggggtacattatgagatgttttgatacaggcatgcaatatgtaacaattacaacatagaaaatggggtatccactccctcaagcatttactctatgttacaatccaattacacatttttttttgagagagagcctcactctgtcgcccaggctggagtgcagcagcgtgatctcagctcactgcaacctctgcctcctgggttcaagcaattctcctgcctcggcctcccgagtagctgggattacaagtgtatgccactatgtccgactaatttttgtatttttagtagagtcaaggtttcaccatgttggccaggctggtctcgaactcccaacctcaggtgatctgcctgcctcagcctcccagagtgctgggattataggcatgagccaccgcaactggtcaattacacccttttcgttattttttttctttttaatagagatagtctctgccatgttgaccaggcttgtacagaactcttggcctcaagcagtcccccatctcagcctcccaaagtgctgggattacaggtgtgagccacagcgcccggcttcttttagttactttaaaatgtacaactagtcacccggatgtgctgtcaaatagtagatcttattcattctttctaattattattattattattattattattattattattatttgagacagagtttcactcttgttgcccaggctggagtgcaatggtgcattcttggctcattgcaacctgtgactcccttgttcaagcaattctcctgcctcagcctcccaagtagctgggattacaggcacgcgcccccatgcctggctaattttttatatttagtagagacggggtttcaccacgttggtcagactggtctcgaactcctgacctcaggtgatccacccaccttggcctcccaaggtgctgggattacaggcatgagccaacactcccagcctattattattattactattttgaggcagagtcttgctctgttgcccaggctggggtgcagtggcgtgatctctgctcactgcaacctctgcctctgcccagctaatttttgtatttgtagtagagatggggtttcaccatgttggcctggctagtctcaaactcctgacctcaggtgatcctcccgccttgggctcccaaagtgctgggattacaggcatgagtcactgtgcccggctgttctttctaattattatttttgtacccattaaccatccatcccctcctctgccacctccccaaccccactggctaatttttatatttttaatagagataaggtttcaccatgttggccagcctcgtctcaaactcctgacctcaagtgatccacacaccttggcctcccaaagtgctgggattacaagtatgtgccactgcacccagccagagcgccattgaatgttatttgttacttctgtcttgctgcttttaggattctttctttatccttgacctttgggagtttgattattaaaggacttgaggtagtcttcttttttttttttttctttttttgagacggagtttcgctcttgttgcccaggctggagtgtaatggtgcgatctcacctcaccacaacctctacctcccaggttcaagtgattctcctgcctaagcctcccgaatagctgagattataggcatgtgccaccaagcctggcttttttttttttttttttggtattttttagtagagatggggtttctccatgttggccaggctggtctcaaactcccgatctcaggtgatccgcccgcccaaagtgttgggattacaggcgtgagccaccacgcccggcaggtagtcttctttgggttaaatctgcttggtgttctataaccttcttacatttgaataccgatatccttctgtagatttgggaagttctgtgttattattcctttagataaaccttctacctctgtctctctctacctcctctttaagtccagtaattcttagatttgtccttttgaggctattttctagattttgtaggtatgctttattcttttatcttttgtctcctctgtgtattttcaaatagcctttcttcaagttcactaattatttctttttttttctttttctaagatagagaaaggggtcttgctatgtaacctggcctcgtctcaagctcctaggctccagtgaccctcctgccttggcctcccaaagtactgggattacaggcatcagtcaccatgcccagccactaattttttcttctgcttgattaattctgctggtgagagactctgatgcattctttagtttgtcaattgaatttttcaactccagaacttctgcctgattcttttaattatttcaatctctttgtttaatttatctgatagaattctgaatttcttctgtgttatcttgaattttgttgagtttcctcaaaacagacccctccttctctctctctctctctctcccccacccatatatatagtttttgtttgtttgtttcttgttgagacaagatctggctctatcacccaggctggagtgcagtgccacagtcttggcttactgcaacctccacctcctgcgctctaaccatcctctcaccttagcctcctgagtagctgggaccacaggtgcacactaccatgcctggccaatttttgtattttttttgtagaaacggggttttgccatgttgcccaggctggtctcgaactcttgagctcaagtgatctgcccacctcagcctcccaaaatgctgggattacaggcgccagccactgcacccaaccccagaacagctaatcaattatctgtctgaaaggtcacgtatctctgtctctctatgattggtcactgatgcttttattttatttt[132 bp omitted]cctcagcctcctgagtagctgggaccacaggcacccgacaccacgcccggctaattttttgtttttttagtagagacggg[146 bp omitted]agagttttgctcttgttgcccaggctggagtgcaatggcacgatctcggctcaccacaacctccgcctccctggttgaagcgattctcatgcctcagcctcccgagtagctgggattacaggcatgcaccaccacgcccagctaattttgtatttttagtgagatagggtttctccatgttggtcaggctggtcttgaactcccaacctcaggtgatctgcccgcctcggcctcccaaagtgctggtattacaggcatgagccactgtgcccggccggctttatttagtttctgtggtgaggtcatgttttcctggatggttttgttacctgaggatgttcatacatttctgggcactgaagagttaggtatttattatagtcttcacagtctgggcttgtctgtactcatccttctttggaaggctttccaggtattgaaaagacttttgtgttgcgatctaagtctttagtcactgcagctgtatctgcatcagggggcaccccaagcccaggaatgccgtggcccttggagacttgtagagacactgccttggtggtcttggataagatctggaagaattctctggattatcaggcagagattcttgtcttcttccttttctcccaaacaaatggagtctctctgtgctgagctgcctggagctgggggaagggtgatacaagcactgctgtggccaccagtgctgggactgtgctgggtcagacgtgtagccagcccaacacggggtctcccccaaggcccgtggtcagcactgcctgggtaccacctatgtccactgaaggccctagggctctgtgaggagcagacggcaaatccagccaggcttgtgttcatcctttcagtgtggtgtgagccccccatcacaggtgcgcccagagatgccatctgggagccagggcctggagttggaaaccttagggactctacctggtactctgttctactgtggctgagctggcacacaagccacaagacaaaatcttccccactcttttttctgcaagcaggggagcctctccctgtggccaccactgccccaggaccatggcagctactgcttggctactgccggtgttcatttaaggaccaaggtctcttcagtcagcttgtgtgaaggctgccaggcctgggtctctcccttcagggcagtgggctcccctctggccaaaggtaggtccagaaatgacatccaagagccaaggcctggaatcagggacccccaagagccaacttggtgctctactccactgtggccgagctggtaactaagctgccagacaaaggcccctttactcttccctcccgcttccttgagcagtaggagcctctccccgtagtcaccacgtcagggaatatgctgggtcatatctgaagtcagtgtgtctctgagtctcactcaaggcccacacggagtactgcctgggtactgctgctgattattcaagggtcctttagtcagcaggtaatgaatcctgcctggactgggctatttccttcaaggcagcagtttcttttctggcccagatgtttctagaaatcgccttgaagctagagcctggaatggggccctcaggaccctgcttggtgcgctatcctacggtggctgagctgatatccaaggtgcaaaacaaagacctctttattcttcccgcttatctcctccagtgtgaggaagacatttcaagccaggcgtggtggctcacgcctgtaatcccagcactctgggaggctgaggcaggcagatcacctgaggtcaggagttcgagaccagcctgaccaacacggtgaaaccccgtgtctactaaacatacaaaattagccgggtgttgtggcacacgcgtgtaatcccagctactcaggaggctgaggcaggagaatacttgaacccaggaggcggaggttgctgtgagccgagatcactccattgcactccagcctgggcaacaagagcaaaactccgtctcaaaaaaaaaaaaaaaaaaaaaaaaaaaagagactatttttgctaccccgttcagtggctctttcagtgatatgaagttaaaaccaggtactgtgttcgctcacctgattttggttcttatgaagtgcttttttgtgtggatagttgttcagctggttgttcttctgaaggagatgattactggaggcttctattcagccatcttcccctgcctcctcataattgctatctctttattgattttctcatgttgtttgtatattggttgtatatcattttcctgatttccatttattctttgtctatggtttcctttagctcataaagcatatttaagacagtcgatgatgtctgtgactagtaattccaatgtctgtgcttcctcagagatggtctctgtcaaaagaacttttttttactataaataagccatacttgcccgtttctttgtatgttttgtagtatttttgttgaaaattggacttttggagtattataatatgttaattattgaaattggattcaccctttccttggagattgctgggttttgcttgtcaagggctagagccatctgtttgactttttaaaactgtttttgcaaaatgtgtattccttttgctgtgtagtcactgaagtttctattccattttttctgttttttttttgttgttgttgtttttgtttttgagatggagtcttgccctgtcgcccaggctggagtgcagtggtgtgatctcggctcactgcaagctcctcctcccaggttcatgccattctcctgcctcagcctcctgagtagccgggactacaggcacccaccacc[131 bp omitted]caccgcgcctggcctttttttttttttttttttttttttaatgagatggagtctcactttgtcgcccaggctagagtgcagtggcacgatctcagctcactgcaacctctgcctcccaggttcaagcaattctcctgcctcagcctcccaagtagctgggattttaggcctgtgccaccatgtctgcctaatttttgtatttttagtagagatggggtttcaccatattggtcaggctggtctcgaactcctaacctcaggtgatccacctgcctcagcctcccaaagtgctgggattacaggcatgagccaccgcgcccagccaatttctcaggtatttatttatagcagtataaaaacagactaatacacccgcgatcgttccatttatttccctcttgtttattatgagcacatatgtgttccaaaagacagtgtgcttagataaattgtttgtaccttcaaactagacacaatctaaatgtcaatccattggtgactgggtaagtaaagcatgctacattcatacaacagacattatagcaatgaacacgaatgaccttctgctgtacacaacatgaatgtatctcacaagcataatgttccaccaacaaagccagagcacataccgtatgattccacttatctccagtcagaaccaggcaaaaccatgctaggggtgttgaaggtcaggacagcagttaattggggaggaggcaaggggtaatgactgcatgaagggttgcatctgagccactgtcaatattgtatttcttcataggggtggaaattaaagatttgtgttcacactaaaaatttgtgaactctggtatgtgtgttatacttttttttttttttttgagatggagtttcgctcttgttgcccaggctggagtgcaatgacatgatctcagctcactgcaatctccgcctcccagttcaagcgagtctcctgccccagcctcccggtagatgggattacaggcatgcgccagcacgtagtagagatggggtttctgcatgttggtcaggctgggcttgaactcctgacctcgtgtgatccacccacctctgcctcccaaagtgctgggattacaggtgtgagccaccgcgcctggccaattttttattctttttgaggcagggtctcactctgccaccttcctaaggtgcggtggcatggtcatggctaactgtagcctagacctcctgggctcaggcagtcctcccacctcagccacccgagtagctgggactacaggttcacaccaccatgcccagttactttttgtaattttaccagagacggggttttggaatgttgcccaggctggtcttgaactcctgcactcaagtgatccgcccactttggcctcccaaagtgttgggattataggcatgagccacagggcccagccacaaatgtatatttaatttacatggaagcctactgttctcctccctccctccttccctccctccctccctccctccctctctcccttcctccctccttccttccttcctcagagtttctctcttgttggccaggctggagtgcaatggcatgacctcagtgcactgcaatctccgcctcctggcttcaagtgattctcctgcctcagcctcccgagtagctgggactataggtgtgcaccaccacgcttggctaatttttgtgtttttagtagagacaaggtttcaccatgttggccaggctggtctcgacctcccaacttcaggtgatccacccgccttggcctcccaaagtggtgggattacgggcgtgagccaccgtgcccagcctgcctttttcaagtagtcatatgtcttggagagcattctaatcagaatgaaaaacagctgagccattctgtttacttatacggtgaccaagccatctgctagtcattcccctattgatgatcattcagggtgttccctattgtttgtgactacatatggtgtggcaaagaatatctttgaatatattcatttcccacatgtatgggtatcttggaaagaaacacatttccagatgtggagttgttgggtcaaagggtgagtacattttaaattctgttaggtgctactttattttttaattttttatttttttttgagacaggatctcattctgttgcccaggcatggtggcacatgcctatgatcccagctacttgggtggctgaagctcgagaattgcttgagcccaggagatggaggttgcagtgagctgagatcgcaccagtgcagtctagcctgggtgacatagcgagactctgtctcaaatataatgcaacatggtgtccatggtccaggtgaggctgagctaggaggtctgaggtcagggtaggtctgacccctctgggtggtcctcagtgtcccacagcactgagcctgccaaggaggaggtgctaggggaatattcctgagggaatttagggagatgggagtgaatttgatgagcaggaggcaggggtctttgggtaagtgagagaatt[131 bp omitted]ctactaaaaatactaaaaatacaaaaaattagccaggcatggtggcgggtgcctgtagtcccagctacgtgggaggctgaggcaggagaatggcgtgaacctgggaggcagagcttgcagtgagccgagatggggccactgcactccagcctgggcaacagagcaagactgtctcaaaaaaaaaaaaaatcaattttaggaaagtgtctgagagagatcagtgactcagaagagtttgagtggggaagtgctcagaagccatggcttcttgcagggggtatggtcccacaggggcccacggggtttcctgggcacagggacccaagtgggacctcagcaggtgggtgggatgctgggagtggagggggctgaggggtgttctttcctttactcccttatggctgcagtgagctatgatcgtgccactgcactccagcctgggtgacacagtgagaccttatctcaaaaaaagaaaaagaagtccaggtgcggtggctcacacctgtaatcctagcactttgggagaccaaggtgggaagatttgctagagctcaggagttcaagaccagcctgggcaacatggcgaaaccctgtctctacaaagtaaacaaaaattagctgggtgtggtggcaggtgcctgtaattccagctacccaggaggctgaggcatgagaatcacttgaacccgggaggtggagtttgcagtaagctgagattgtgccactgcactccagcctgggcaatggagtgagactctgtctcaacaacaaccaccaaaaaaaaagaagaagaagaaaaagaataaaaaagaagatttagaggctgggtgtggtggctccccctgtgatcctagcacgttgggaggccgaggcgggtggatcacctgaggtcaggagttcaagaccagcctggccaacatggtgaaaccccgtctccactaaaatacaaaaattagccaggcatgatggtgggtgcctgtaatcccagctactcaggaggctgaaacaggagaattgcttgaacctgggagatggtggttgcagtgacccaagattgcaccactgcactccagcctgggtggctgagcgagactccgtctcaaaaaaaaaaaaaaaaaaaaaaaaagatctagaaaggagagttagggagtccatgaaaaatctctagccagccctcctgaagcactagacaggggaacaagtcagagtttgcaggaaaatctgggaagtcaggcatatccaactatcagagtcatggaaggctgttgcctctgcatctgatgttgagcccgaggtcactggtggttagcagggcagaaaattgagaagagataaacaggagtgtgggggaaacaaggtcccgaacacttgcatctgtctcaccctgcagggcagagcgagagcaaatgggaaccccctaatgcatctacatctgtcttttcccccatctaaatagagcaaccgtccaagaaaaatactgtgctaaacttctttcttccagttttcatgcaattttctcctttggccaactctaacttagaaccatatggggaaggggtttttttgtttgtttgttttgttttgttttcagagtcttgctttgttgcccaggctctggagtgcagtggtgcgagctcggctcactgcaacctccgcctcccaggttcaagcaattctcctgcctcagcctcccaagtagctgggattacaggcacccgccaccacgctcagctaacttttttgtatttttagtagagacaaggtttcgccatg[134 bp omitted]tagcctgtgaggtttccactgaagtctgctgccagacgtattggagctccattgtatgtttgtttttgtttttgtttttgagacagagtctcactcagtcacccaggctggagtacagtgacgaaatctcggctcactgcaacctgcacctcccaggttcaagcgattctcgtgcctcagcctcccgagtagctgggattacaggtgtgagccactgcgcctggcctcatgcctggctaattttttttgtatttttagtcgagacgggatttcaccatgttgcccagactggtctgtaactcctggcctcaagtgattcacccgcctcagcctccctaaatgctggggattacagacgtgaaccactgcacacggcctccattgtaagttatttgttacttttctcttgctgcttttaggaccctttctttatccctgatctttgggagtttgattattaaatgccttgaaggtagtctttgggttaaatctgcctagtgttctataaccttctcgtatttgaatattgatatctttttctaggtttggaaagttctctgttattatcccacttaataaactttctattccaatctctctactttctctttacggccaataaaactcagatttttcctttttgtggctattttctagatcttgtaggtgtgccttattctttttttttttttttttttttttttgagatggagtcttgctctgtctccaggctggagcacagtggcacgatcttggctcactgcaacctccgcctcccgggttcaagcaattcccctgcctcagcctcccgagtagctgggattacaggtgcctgccactacacctggctaattttttgtattttggtagagatggggtt[132 bp omitted]cctctggctgtgtcttgtcctgtctcatctcttttctcttctcttctgttctcttctgttctcttctcttctgttctcttctcttctttcttctcttctcttctcctcctctcctctcctctcttctcttctctttttgagacagagtctcactttgtcgaccaggctggagtgcagtggtgctgcaatcttggctcactacaacctccacttcctgcgttcaatcaattctggagcctcagcctcctgagtagctgggattacaggcatgcaccaccatgcccagctaatttttctatttttagtagagacaggatttcactatgttggccaaactagtctcaaactcctgacctcaggtgatccaaccacttcagcctttcaaagtgctgggattacaggtatgagccactgtgcccggcctgactgcatattttcaaatagcctgtctttgagctcaccaattcttcaggttgatcaattctactgttcagagactgatgcattcttcagtgtgtcagttgaattttttctacttaatttttttttttttttttgagacggagtctcgctgtgtcgcccaggctggggtgcagtgacacgatctccgctcactgcaagctccacctcccgagttcatgccatcctcctgcctcagccttccgagtagctgggactacaggcgcctaccaccacgcctggctaatttttttgtatttttagtagagatggggtttcaccgtgttagccaggatggtcttgatctcatgacctcgtgatccacctgcctcggcctcccgaaatgctgggattacaggtgtgagacaccgtgcccagcccctttctgcttaatttttaaaaattatttcaatctgtttggttaatttatccgataggattctgaatcccttctctgtgttatcttgaatttcattgagcttcctcaaaacagctgttttgaattctccgtctgaaaggtcacatagctctgtcacaatggggttggtcactggagccttgtttagttcacttggtgaggtcatgttttcctggatggtgtcaatgcttgtggatgttcgtcaatggctgggcattgatgagttcagtgtttattgtagtctttgtagtctgagcttatttgaacccatccttcttgggaaggcttgccaggaaattgagtgttgtgaactaaacttttggtcactgcagctgtatctgcattagggggcaccccaggctcagtaatgctgtgattcttgcagcatcttagaggtgctggccaggcgcagtggctcacgcctgtaatcccagcacattgggcagcctaggcaggcggatcatctgaggtcgggagtttgagaccagcctggccaacatggtgaaaccctgtctctaccaaaaaatacaaaaatttgccaggcgtaggggtgggcgcctgtagtcccagctacttgggaggctgaggcgggagaatcacttgcgcatgggaggtggaggttgcactgagtggagattgcagcactgcattccagcctgggcgacagagtaagaccctgtctcaaaaaaaaaaaaaaaaggaatcttagaggtactgcctcagtggtcttggttaagattcaggagaattccctaaattaccaggcagaaactcttctcttcccttactttctccaaacaaacgcagtctctctatctctgtacggagctgcctggggctgctggaggggtgacacaagtacccttgtggccaccaccactgggactgcactgggtcagacccaaagccaacacaccactaggtctcacccagggcccgtggcaaccactacctggcttccaccaatgttcacacaaggcccaagggctcttcggccagcaggtggtgaagcctgccgggcttgtgtccttcccttcaggatggtgagttctctcctggcccagggcaggtccagaaatgccatctgggagccagggcctggagacagaaaccttaggaatctacctggtgctctattctactgtggctgagctggcacccaagccacaagaaaaagtctttcctacttgatatggtttggctgtgtcccacccaaatctcatcttgatttgtagctcccataattcccctatgttatagggggtacccagtgggagataagtgagtcatgggggcagtttcccccatactgttcttgtggtattgaataagtctcatgagatctgatggctttataaggggaaacccctttggcttggttctcat[181 bp omitted]ctgtaatcccagctactctggaggctgaggcaggagaatggcgtgaacccgggaggcagagcttgcagttagcccagactgtgccactgcactccagcctgggtgacagagtgagactccatctaaaaaaaaaaaaaaaaaaaaaaaaaaagacgtgcctttcagcttctgccatgattgtgaggcctccccagccacgtggaactgggagttcattaagcctctttttctttattaattacccagtctcaggtatgtctttatcagcagcatgaaaacagactaatacaccactcttccctcacttttcctcacacaggagtctctctctgtggccaccactgctccaggcccatggcaggtactgcctggctactgctgatgttcactcaaggcccaggccctcttcagtcagcttgtggtgagtgctgccaggcctgggtcttttccttcagggaagacagctcccctctagcccagggcaggtccagaaatgctgtgcaagagccaagacctcaattggggatgccagcagctgctgggtgctctaccctactgtggccaagctggtgtccaagatgcaagacaaagtctcctttactctttcctctcctttcctcaagcaggagtctttccccagggccaccacagctgggaatgcgctgggtcacacctgaaatcagcacggcactgggtctcacccaaggcctgcggcgagcactctctggcaaccactgatgtttattcaaggcccaagagatctttagtcagcaagtaatgaatcctgccaggactgggtccttcctttcaaggcagcggcttcccttctggtccagggtgtgtccaaaaatgtcatccaggagttagggcctggaatgggggcctcaggactccgcctggtgccctatcctcctatggctgagctggtatccaagttgcaaaacaaagacctcttgacttttcgtctcctcttctcaagcagaaggaaggagtctctcccggaactgcaagctatactgcctggggtttggggctcgggggctcaagcactcccttggctgcctcagccaatgtctcagtgggcctcatgccctccaggtccacttgttctgagcccagcaaggcaccaggacttgcccagaaattgcagtccttgtggcctgactgcctttcaagtttatttatttatttatttatttatttatttgagatggagtcttgctgttgtccgggctggagtgcaatgacgtgctctcggctcactgcaatctctgcctcttgggttcaagcgattctcctgcctc[134 bp omitted]gcttcccaaagtgctgggattacaggcatgagccaccgcgcccagcctcaagttgatttagggtcccagagcactttggcccgcagtggctaggcatgccagaactcaggttctcaccactagaatagatgatttccctctgtctaatgatcatttaaatgctccctccatgggtggtgtctgatttctgccccatggtgctttccactgtaatagaacagcgctgagttccaatgcaaagcctcaaatcagtcactgagctctccctaccccaaatgcacagattctctctccttgccatctgactgctgccaggagatgtgggaggggtggcattttggggtagcacctcaccccaaaagcccattggcttaaaatagcagtcccatcccaaaatctcaaaccaccccaaaagctcattggcttaaaatagcagtcaaatatgacatctcatggttcagtaggttaagtgggtttaaccagtcgattcttttttttttgagatggagtctcactatgtcgcccaggttggagtgcagtggcgcaatcttggctcactgcaatctctgcctccccggttcaagcaattctcctgcctcagcctcccgagtagctgggattacaggtgctggctaccacacccggctgatttttgttttgcctttttttttttttttttctgagatggagttttgctcttgttgtccaggctggactgcaatggtgtgatctcggtttactgcaaacctccgcctcctgggttcaagcgattctcctgcctcagcctcccgagtagctgggatgacaggcacccaccaccatgccccagctaatttttttgtattttcagtagagacagggtttcaccaagttggctaggctggtcttgaacccctgacctcaggtgatccatgtgcctcagcctcccaaaatgctgggattacaggtgtgagctactgcaccctgccaaatgagccaatgattgggtggagtttctcaactagttgcattcagatggcagctggggctggagtcatccaaaggctcagctgggctggaaatccaagatggcgtcttacatgtctgacatctcagttgggatggctagatcagctgcggctgaccagttatctatctctctctccatgctgcctcttgccatgcccagcttcagcttctgcatagcatggcagtctcaggatattcagaattttttttttttccccagatggaatctcactctgccaccaaggctagagtgcagtggcatgatcttggctcactgcaacctccacctccagggttcaagtgattctcgtgcctcagcctcctgagtagctgggattacaggcatgcaccaccatgcctggttaatttttttgtatttttagtagagacagggtttctccatgtttgctaggctggtctcaaactcctgacctcgcgtaatccccccaccttggcctcccaaagtgctaggattacatgtgtgagctgccatgcctggctgaaaataatagatttatacctaaccatactaataattgcattgactctaaattatgtaaacatccaattataagacagagatttcagactaaatgaaaaagcatgacccaactctatgctgcccacaagaaattgtgtgtgtgtgtgtgtgagacggagtcttgcactgtcgcccagactggagtacagtggcatgatctcagctcactgcaacctccacttcccgggttcaagcaattctcctgcctcagcctcccaagtagctgggattacaggtgcccaccaccacacccggctaattttttgtatttttagtagagatgaggtttcactatgttggccaggctggtctcaaacacctgaccttgtgatctacccgcttcagcctcccaaagtgcagggattacaggcgtgagccctgcacctggccaaaatacactttaaatagaaagacgttctgtacaaaagttaactcaaaatggaccacatcactaaatgcaaaacttaacatttctagaaggaaacataggagaaaatctttgtgaccctagatgatgcaaaagttcattatgtacaagcatgatcataagagaaaatcttgataaattagattccatcaaaattaaaaacttctgctcttcaacaaacattattaggagaatgaaaagataagccaaacagtgggagaaaatatttgcaaattacatacttgataaacaactagtatccagatattttaagaacccttaaaagtcaatagctagaaaacaaacaacccaattatttaaaaagggcaaatgatttgaataaacacttcactaacgaagatatgcagatgacaaacaagtacacaaaaagctgctcaacatcctcagtcgttagagaaacgcaaatgaaaaccacaaggtcactctccacctattagagtggttatcgtggagaaaagaggcagagtgattgcttgaggccaggagtttgagaccaacttgggcaacatactgagataccgtct[134 bp omitted]tctagtaaaaaaatatatataccaaaaattagctgggcatggtggcgtatgcctgtaattccagctatttgggaggctgaggcaggagaattgcttgaaccccggaggtggaggttgcagtgagttgaaatcccgtcattgcactctagcctggatgacaagagtgaaactctcaaaaaaaaaaaaaaaaaaaaaatctattattttcatggtttttcctgattcatctggtcattgttctctttttccaccttcttttggattaatcaagtttttttttttttttttttttttgagcaaggatctcactcttttgcccaggctggagtgcagtggtgtgatcatggctcacttctgcctcgaactcctggacaaaagtgatcctcctaccacagcctctccagtagctgagactataggcgtgtgcccccacacctagttaaatttttttttttttttttaatagagatggtgtctcatgtgctgcccaggctggacttgaactcctgggctcaagtgattcctcccgccttggcctcccaaagggctaggattataggcatgagccactatgactggctggattaatcaagtaatttttttatgattccattttatctcttttgtaggcttattagctatagctctttgttttattattttatttatttatttatttgagagtttcactcttgtcacccaagctggagagcagtggcacgacctaggctcactacaacctctgccgcctgggttcaactgattcccctgcctcactcagcctccagagtagctgggattataggcgcctgccaccatgcccagctaatttgttttaatagagatagggtttcaccatgttggccaggctggtcttgaactcctgacctcaagtgatccaccctcctcagccttccaaagtgctgggatgacaggtgtaagccaccgcgcccagctattttattttttttgagacagagtctcactctgttgcccaggctggaatgcagtggcacgatatcggcttagtgcaatctctgcctcccgggttcaagtgattttcctgcctcagcctcctgagtagctgggactacaggtgcccgacaccaagcccgactaatttttgtatttttagtaga[156 bp omitted]atctttaact[146 bp omitted]ggaggctgagtcacgagaattgcttgaacccaggaggtggaggttgcagagagctgagatcacaccactgcaccccagcctgggagacagagcgagactccatctcaaaaaattaaaaaaaatttttgcctagtgctacacataggaatgtgcaggtgcacacgcatacacctgcatacacacacatgtgcacaggtacacataggagtgagtaaaaccagtgaaattggaagattaaggtcttagaattgaactaatgtcaatgtcctgttttgatgttgtattacagttatataagatgttagcatcaggtaagtggatgaagggcaaacaagaccaccatgtactttttttttttttttgagatggagtcttgctgtgtcacccaggctggagtgcagtggcgaaatcttggctcatcgcaacctctacctcctgggttcaagcgattcttctgcctcagccttccaagtagctgggattataggcacctgccaccacgcccagctaagttttgtatttttagtagagacgggttttgccatgttggccaagctggtctcgaactcctgatctcgtgatctgccctccttgacctcccaaagtgctgggattacaggcatgagccaccacacccagcctctctttttgtaacttcttatgaatctataatctcttagaaataaaaataatcagtcaggtgccatcgctcatacctgtaatctcagtactttgggaggccgaggtgggtggatcatttgaagtcaagactttgagaccagcctagccaacatggcaaaa[131 bp omitted]tgaccaacagggtgaaacaccatctctactaaaaatacaaaaattagctgggtgtggtggtgggtgcctgtaatcccagctacttgggaggctgaggcaggagaatcacttgaatccaggaggctgaggttgcagtgagctgaggctgtgccattgcactccagcctgggcaacaagagtgaaactatctcagaaagaaaaaaaaaaaagcccacaagtatttggaaagtaaataacccagaagtcgaagaagaaatcaaaagagaaagtataaactacataaaactcaatgaaaaaaaataacatatcaaaatacatgacatgagataaagtaatgcttagaaagacattgatagatttttaaatgcttaattagaaaagaggaaaaggaggactggggagacggtggtcaaaggatacaaatttcagttaggaggagtaagttcaggagatctattgcacaacatggtgactacagttttgttttttttttgttgtttgtttgagatggagtctctctctgttgcccaggctggagtgcaatggtgctacctcggctcactgcaacctctgcctcccgggttcaaaccattctcctgcctcagcctcctgagtaactgggattacaggcgagcaccaccatgcccggctaatttttatatttttagtagagatggggtttcaccatgttggccaggctggtcttaaactcctgacctcaagtgatccgcccaccttggcctcccacagtgctgggattacacgcataagccactgcgcctgaccaactacagttaataacaatgtattgtatacttgaaaatttcgaagagagtagttctatttctttattttattgttattattgtttttttctgagacagtgtcttgctctgtcgcccaggttggagtgcagtaatgcaatctcggctcactgcaagctccgcctcccggtttcactccattctcctgcctcagcctcccgagtagctgggactacaggcgcctgccactacgcccagctaattttttgtatttttagtagagacgag[146 bp omitted]caggctggagtgcagtggcaccatcttggctcaccatctttgctcaccgcaacctctgcctcccgggttcaagcgattctcctgactcagccttccaagtagctgtgattataggcatgcgccaccacgcccggctaatttttgtatttttagtaaagatggggtttcactgtgtt[134 bp omitted]ttatgcacatgaaaaacatcagtcacaaaagactacgttatgtatttccaaatgtgaaaagtccaaaataggtagattaatagagacagagagattagtgtctgcttagggctagaaagttactagggagattggatattaactacaaatgagtatgaggtttctttatttaaaatttttttattgtgctgaaatatacataaaatttactattttaacttttttttttttttttttttttttttttgagatggagtcttgctctgtctcttaggctggagtgcaggggcacgatctcggctcacttcaacctctgcctcctgggctcaagtgattctcttgcctgagcctcctggagtagctgggattatagatgcgccaccacgcctggctaagttttgaatttttagtagagatgtggtttctccacgttggccaggctggtctcgaactcctgacctcacatgatccgcccacctcggcctcccaaagcgctgggattacaggtgtgagccacctcacccggccacttttttttttttcttttttaatgagacaaggtctcacctatcatctaggctacaacgcagaggcacaatcacagccaactgcaaccttgaacacctggcttcaggcgatcctcccacctctgtgtcccaaactgctgtgtgagccactgtgcccagccaaaagctgtttttcaatggaggaccaacatctgaaaagtacattg[135 bp omitted]tgtctttacaaaacaaataaaatattagctgggtgtgctggcacgagcctgtagtcccagctactcagaaggctgaggtgggaggatcacttgggctaggaggtagaggctgcagtgagctatgatcgtgtcattgcactccagcctgggcaacagagcaaagaccctgtctctaaaaaataaataataaatgtctatggactgcacaatattgttgattcctcaactcctctcttgctcttttgcatattggcaacataaaaagtgtcattttcgggctgggcacagtggctcatgcctgtcatcccagcactttgggaggctgaggcgggtagatcacttgaggtcaggagttggagaccagcctggccaacatggtgaagccccgtctctactaaaaatacaaaaattagctgggtatggtggtggtggagggggggcacctgtaatcccagctactcaggagcctgaggcaggagaataaattgcttgaacctgggaggtggaggttgcagtgagctgagatcgcgccattgcactctagcctgggcgacagaatgagactctgactgaaaaaaaaaaaaaaaagaaaatgtcattttcagagggcaaagtgaggaaggtgcaccctcaggacattcttgcctcagcctggggaaagagagtttaagcaattcccccagaaaggcacaggaacctcagcccagagaggggcagcttcctgcctcgggtcaggaagcacagccttgggctccgagagtccctcgtctctacctccccaagttcaaatgtgcatgcgtgaagttccaaacccagccccagtgctaacccctggctgcctcctctttctgacttctcagggaaaaaaaaaaaaaccacatacacacaaaaaatcccacaagtcaggaaacatccatcacgggctgtccagcccaggccggaggggcaggagtcagcagggaggtgacctcaaggtctccgtggggactaggatccggcggggctgggggtgagaggctggaaattttcccaccccgagactttcctgcgtcaacccaggagggcgccctggatgccgccagccctgcccccaacctccttcctctcctgacagggcagcttcccggctaaggatggatggggagggtgtgccaagatggagccaccaggaccaggaatggacaggcactttgagattgaccagacgagggaccctggctcagagtggcgaaggcctggcctcagagccacacagccaggaggtgtacatgggttggcgtcgctcccagcacatgcagcctccctctacctccactaccctgcccaggagctggagcccagcccggccttgggtgtgtgagaagccactggcccggggccctgcttccccggtccttcctccccacaacacactcaggactcagcccttccttgtgttaaatagaaacctctttattctaagtatcgaacgttccttaatacattggattggggccagaccttgaggtgagggaaaggggcgggggagctgggatatttctgtagagacttccagaacgacactcaccactctgggctatggcaggaggggaggtgctgggaacaggcttcatggccttgggaaaatgctttgtctctttggcctctgtttccccctaccttttttttttttttttttttttgagaaagggtcttgctttgttgaccaggctggagtgcagtggcacagtcatagctcactgcagcctcgaactccagtgatcctccagcctcagcctcaccagtagctgggactacaggcacacaccaccgtgcccagctaattttttattttttgtagagatagggggcaggtctcactatgttgcccaggctggtcttgaactcctgggctcaagcaatcctccggcctcagcctcccaaagtgttgggattacaggcatgagccaccgtgcctggcgtttgtttcccttctgtacagggagtttggggttgggtgaaaagacatctaagggtctttctatcccaggggtgtgtggtcccaggcagggagtcaggaggggcgccgtacgggaggttggcttgtcagcagcatagatggggtcactaaggccggcggttgggtgaccctcagcgctgggcccgaggtcgcgctagagacggaggccggggccgaggcagacaggccaaactgggcctggccagccgggagagggggaggcggcccaggaagagagggaggctgagacagaaagatgggcggggcacagggatgtctgcaaagaaggcacggtcccgagggggtgacagggctccctcctcagagagttccaggtcccgggccacggccaggatctcctggcgggcggctgtgttgcgcaggccacggatgtcgaggagggctgccacgtgcttctgcctgtggggagaggaacagacaggtgcatgcagatccccagctctagacacacacccaacccagccgtggaccccacctgaccccctcacctatcccagaaattgcctgagttctggggcctctgtgtcccctccagagccttccctccaatcagctcccttgcccaggccctcacctcataccagctccctccagaacttcacttccaaccatctccaaatcccccttacaaccaaccccagaaccagccctgggatcttccttttcaccccaagcctcagctcgtgattaaaattcaccttctcagctgggtgccgtggctcatgcctgtaatcccagcactttggggggccaaggcaggcggatcacctgaggtcaggagttcgagaccagcctggccaacatggcgaaaccctctctctactaaaaatacattaaaaaaaaaaaaaagctgggtgtggtggcaggcgcttgtaatcctagctactcaggagtctgaggcaagagaatcccttaaacctgggaggcagaggttgcagtgagctgagatcgcgccactgcagtccagcctgggtgacacagcgagactccatttcaaaagtaaaaaaaagaaagaaaccttgtaccccactccccctaaatcctcagccctaggtacctcctaatctcaagctcaaccccctaaacccaacccagctagcaaactcttaaacttagctacagattcaagttctgactcatgatccaatattcaagttcagaaactccacatcagcaagaatactgggacttcttgggaccccatgggactccaggaatatgtgccttcccaaggacatgaccttatcccccagaatcagaactgaccaccctgaatcaattccaggacccccaccctcagtgctgaaactgaaacccgctcatgcctcactccttgtttttctggggttctgtttctctgagtatgtctgagaatgtgtctgcccaaatagcactgcaaggactggcgttgctccggcagccaccaccactgccaccaccatccagcactgtcacatggtggtgtggtgtgctgatctggtacactagtttttttgtgtgtttgtttgtttgtttgtttgttttgagacagagtcttgctctgttggccaggctggagtgcagtggcgcgatctcagctcactgcaacctccgcctcctgggctcaagcaattctcctgcctcagcctcccgagtagctgggattacaggagtgtgccatcacacctggctaatttttgtatttttagtagagacggtgtttcaccatgttggccaggctggtctcgaactcctgacctcaggtgatccacctacctcggcctcccaaagtgctgggattacaagcgtgagccaccatgcccggccgatctggtgtactagttttagagccagtctactgcctgggttcaagttccacctttgccacttgctaggcgtgatatttcaatagctttaattataccccttacttataggccaagcgcagtggctcacgcctgtaatctcagcactttgggaggcagaggcaggcggatcacctgaagtcaggagctcaagaccagtgtggtcaacttggtgaaatcccatctctactaaaaatacaaaaattagccgggcgtggtggcacatgcctatacttgggaggctgaggcacaataatctcttgaacccgggaggcagaggttgcagtgagctgagatcactgcacttcagcctgggcgacaaagtgagactctgtctcaaaaaacaaaacaaaacaaacaacaacaaaataccccttataaagttggcatgggctgggcaacggtggctcacacttccccattcgtgggaagccgaggcaggcagatcacttgagcccagaagttcgagaccagcctgggcaacatggtgaaacccatctctgcaaaaaatacaaaaaattagctgggcattgtggtgcatgcctgtggtcccagctactcagaaggctgaggtgggagggctgcttgagcccaggaggtcaaggctgcagtgaaccgtgattgtgccactgcactccagccagggaaacagagtgagaccctgtctcaaaaaaaaaagaaaaaaagttggcatgtaagatgcttatttaggtctgaaataagaactcattgagtgagaactggaattgttactatagtcatggatgatgatgatgatgatgatgatgataaatttccctaataaccctatgacgagaatactactatccccatggaacggatgaggaaactgaggctccgagaaggtcacctacaaaggaagtgacctggcaggagttgaatgccgcctgcgcctgccgctgtcccagtgcgtgtgcgcccgtgtgccctgcgtgtccctgagtcccctgcggctcccctgcgggctggcccttcctgcctccaggcagccctgcgcccccctgccctgggcttcctgtgaccgcctgtttgtttgtgagccctggtggcggtggcggcggaggcagcagcggcggcaggagaaggagggaaatcttattaataatgccctggttccagcaggaaacggccgtcagacacgctcaccggctccctccctcaggaggcaggaagcacagggacggatgccaaggccgccaggagacctcggccaggcacggcgagccctggcccaggcggggtgtctcacctgatgtctgggtagtcgcgcaccaacactcccacctccacctggatgctgggcgtgtcttccagctgcatgacttcagccaaatggggcaccacggcatccagccacgaggcctgggactcctgcaggggagggagggtgcggggtcacaccctcccaagattgaccctgccaattcctgcccctcctggcttgttataccatctctaaaatgtagcagaaaccaggggtggtggctcaagcctgtaatcccagcactttgggaggaggccgaggcgggtggatcactagaggtcaggacatcgagaccaacctggccagtatggtgaaaccccatctctactaaaaatacaaaaattagccaggcgtggtggtgcacacctgtaatcccaactactcaggaggctgaagcaggagaatcacttgaaatcgagaggcagaggttacagtgagcggagactgcaccactgcactccagcctgggtgacggagcgagactctgtctcaaaaataaagaataaaaataaaaataaaaaataaaatgtagcagaagacatactatggccacatttgagaaaaatccataatataatctcctcccagttttgcaggtaatttggaactctgggaaacatctccaaacctcttccacgtctgcaaaatcttgcctttgcggggatggagactggacaaagtgtacaaggaagctccctgcattctttcttacatctgcatgtgaatctacaattatctcaaaaattttccaaagaaaacattccaaggactccgggcttggaactccaagaagagcgactgaatgaggcccttccagcccagctgaatacaactgggtacaaataagatctggcggtttttaattccagggtttagaaatgttaggatttctgtgtttctgttgcatgtagtttctctgtacgttcatggagtcttttttttcttttttttttgagacagagtctcactctgtcctccaggctggagtgtggtggcaggatctcggctcactgcaacctccgcctcttagttcaagcgattctcctgcctcaacctcccaagtagctgggattacaggcgtgagccaccacacccggataattttggtaatgcaaggagttttaactctgagccaggcactgtccaaagcacttaacaggaattaaccaatctgatcctcaaaacaatggatagggaccattattcgccttatttaacagccgaggaaagcgcccagaggcgagttctcagagcaagaaagccaggttttaagtgcaaagggtgtcggtcaaagttactggttgctattgacccgaagttgggtgagagtttctgtcctgagctctgcccctctccccctggcttttgggacctgagattctcggaagccaagccttgtcctggtttctgaaacacccccaaccgcgtcccgacactgaccagccgccggaacagcctctgcagttgcgccgcgtcctcccggagcctgccggccacgcggctgcgggtccgcgccgagctgcagcgcaggcgcccacggagcaggggccgcacgtactcgaccagcgcccgccggtgtagctcggctaccagcgcctggaggcggaggagggaaacccgaggggtgtgagccatgccccacggactcccatcccgccagtctgaaggccacccccgccccactcgcccacatccactccgggcacccatgggcacccttcccgtgcccacgccccagtccccagcccctgagctatcctaggatgccttccctggccccctaattagcccgcggacagtctctgccggtccccaaagggtgctccatcccagcctctccccattccccaagctccactctcaggggccctgactcagtctgcaccccgccttacaccccagttccacgcacatgcctccccgcagaccccgggcaggggccacctctcccatccacagggagccgctccccaccttagaggggtttcctccagcaggagcgttcttggctctcccaacctcccaatctcccctcttcccgtccctttcccctttcctcctcccctcttttcccccacccccacctcccctcccctcaggcaggtgcacctggtaaggctcgtcctgcattctgcgcagggccagggcctgggcacccagcgtgcccacgatgccatccagggcctccgggctgctcagccacttccggcgcatcagcttgttgaagtgtggctggcagggacagagtagggggtcacgctctcctccctcccaccctccctcttcacttaggaataagttcctgcaaccctgctccgtgttgaaccagggctgtgcggtgctgggaacacaaggggaagagatagccccagccctggcatccttggactcacagtccagaaggggagagagactggtccccaggtagtgatgacccaaagctggcaaggctgggactcgggaacccaggggtttaggaagcccagaggggatgcctgactcagcatagagccatggagggcttcctggaggaggggacaccggaactgaggccctggtgatgatcttccttagccaagtgagggatgggggagggggagtggctcaatgggagaaaatagtgagtattaagaaagttcagatttcagatgggcatgtcagggagaggaccagcgaaaaggtcagtgtggttgatgaaaacaggggacttcatttaaaaattattaagggccgggcacagtggttcacacctgtaatcccagcactttggtaggccgaggcaggagggtagcttgagcccaagagtttgagaccagcctgggcaacattgcgagaccccatctctacaaaacatttaaaagttagctgggactgcgcgcagtggctcacgcctgtaatcctagcactttggaaggctgcggcgggtggatcacctaaggtcaggagttcaaccctgtctctactaaaatacaaaaattagccgggcgcggtggcgtgcaactgtagttccagctactctggatgctgacacagcagaattgcttgaacctaggaggtggaggttgcagtgagccgagatcacaccactgcactccagcctgggcgacagagtaagactccgtctcaaaaataagtaaatcaattaaaaataataaaaattagctgggtatggtgtcatgtgcctgtagtcccagctactcagaaggctgaggtgggaggatggcttgagcccaggagttcaggctgcagtgaaatatgatcatgatactgcactccagcctgggtaacagagggaggccccgtctcaaaaaaaaaaaaaaaaaaaaagagaaaaagtaagaactttaagacatatttttaaaattcattaactatgcacagcccttaagggaaggaggacggattgcttccacattccacttcctaggtctggttgagaaaacatgttccccatctggagctcttaggaaggagtatagtaaatgcctcagttaataacatcctcctttttgaaagttgccttttctctccacccttgagtagatccggtatttgacgaaacttgtgaaagtgggtggaacctgtcttgccccctcttttctagaatgcactgtatatgcgactgtgactttcaaggaaatgtgtttgccatttgctgattttggggggaagttaatttctaacttcttccactggtaaatgaaggaaagtattgcaccttgcaaatgcaccaaatgaattgagttcaccattttaaaaaccgtcttttggccaggcggatctcattggaaaattattaaggggccaggcatggtggcttacacctgtaattccagcactttgggaggctgaggtgggtggatcacttgaggtcaggagttcgagactagcctggccagcatggtgaaaccccatctctactaaaaatacaaaaaattagctaggcgtgatggtgggcgcctgtaatcccagctactcgggaggctgaggcagtagaatctcttgaacctgggaggcggaggttgcagtgagctgagatcaagccattgcactccagcctcagcaacaagagcaaaactctgtctcaaaaataaataaataaattaattaagggctgggcacagtggctcatgcctgtaatctcagcactttgggaggctgaggctcaagaattgcttgagccaagggcaacatagtaagactccctctctataatttttttttgtttgtttaattagctgggcatggtggcccacactgtggtcctagctacttaggaggctgatgtgagaggatcatgtaagcccaggtggttgaggctgcaatgagctatgatcatgccattgcactccagcctgggcgacagagcaagattctatctcaaaaaaacaaacagaaacaaaaacaaaactctttttccccctgcccaaaacaaaaaataataataactttaagacagtgacagaagagcattaaaccaagattgggcctttcgaagtgtgtgttttgggggtgagggaagctgtgcgaccctgaagctggcattggggtttattccaggcataagacagggaggggagaggtgaggctggggcagggctggattgcacatggcctcctgggcttggggagaagccccagctttctcctgagggcactaggcagccatggccagtttgagctggggagggagagggtcagatttgtgctttaccgagatgggaggagacgagactgaggtagaaatgatggaggaggctggaaaaaaggggaaagtggagatagggaggggatgaaagggggtgaggaaggggaagaggagaatccaagtggtagaattcataggatgaagtgagtgaccaccacctgtggggagggaagggaggtatctggaggacaccagagaccctggagatgggcaggccgtgggtctctccctgagacaggggcggggggagggtcgggggagaggctgcagtctgggtagacacagggcatgtgaagttcggagatatccccaagatggtatccatgggagggcgtctaattccctcttcagctcagcctcagcacctgctctctcaccctgacagcagcccagttttcttttttgtttttttgtggttttttttttttgaaagatagggtctcactatattgcccaggctggtgttgaactgctgaactcaagcaatcctcccacctcacagcctcccaaagtgctgggattacaggtgagagccaccatgtctaatgtgttgctgggttttgtttgtttgttttgagacggaatctcgctctgtcgccaggctagggtgcagtggcgcgatcttggctcactgcaacttctgcctcccagtcaagtgattctcctgcctactctcctgagtagctggggctacaggcacgtgccaccatgcccggctaatttttgcatttttagtagagatggggtttcaccgtgttggccaggatggtctcttgaccttgtgatctgcctgccttggcctcccaaagtgctgagattataggtgtgagccactgtgcccagcagggctttttttttttttttttttttgatacagggtcttgcactgtctcccaggctggagtgctacggtgtgaacacagctcactacatcctcaacttcctgggatcaagcgatcctcccacttcagcctcccaagtacctgggactacaggcacccaccaccacacccagcttattgttttttattttttgtagagaagaggcctcattatgttgcccaggctggtcttgaactcctgggctcaatcgatcctcctgcctcagccttcaaaagtgctgggattacaggtgtgagccaccacgcccggccagctctgttttctgaacctccaaaaatggagcaaggcatgagggaacccacataatgcctgggccctggtgattctcccagggtccccaccctggctgatgctcacatacacatgcacactcatgcacacggcgcacacacacacacaaacactccctcaaaagcctacagctgttcacacactcacacaggcatgcgagcacagcactgtgtcctgtctcttcatgtctctagctggttgtttttctctccttttttttttttttttgagacggagtctcactctgtcgcccaggctgaagtacagtggcatgatctcatttcattgcaacctctgcctcccacgttcaagcgattctcctgcctc[135 bp omitted]tggcttcccaaagtgctaagattacaggcatgagccaccacgcacagtctatctctagctggttctgatgtctctccctctgtccctctgtcccagtctctctcctttccttcctccctcacctatcttgttttctcagtctctccctgtttcttttgcttctgctctctctgtctgtgtctctctctccctcaaaacatacatagtggtttataaggccaggcacagtggctcatgcctgtaatcccagcctgggtgacagagcaagactctgtctcaaaaacaatttaacaaaaacaaaaaagcaaacatacatagtggtttatagactaagaccgtagattcgcaatgggctttgccacttgctggtctcatcttcctcacctgtaaaatgaatctacaacccatctcataggattgcagtgagaattaaacgagccgatactctcaagcacctggcacagtgagtcctgagaatgtgtttgctgttgctataaagtctgtatatttaagatagcaagctgggtgtggtggcttacatctgtaatcccaacactttgggaggccaagtcaggaggatcgcttgagcccaggagttcaagaccagcctgggcaacatagtgagaccctgtctctaccagaaatacaaataaataggcagggcgaggtagctcacacctataatcccagcactttgggaggc[134 bp omitted]gtgctttggagaaaaatagcagggagtcgggaggggggtttggtctaggggcttctgtttttttgttttttgagagggaagtctcgctctgtcacccaggctgcagtgcaatggtgcgatcttggctcactgcaacctcagccccctgggtacaggcaattctcctgcctcagcctccagagtagctgggagtacaggtgtgtgctgccacacctggctaatttttgtaattttagtagagacggggttttgccatattggcca[259 bp omitted]taaaacaccatctctactaaaaatacaaaaaaattagctgggcgtggtggtgcatgcctgtaatcccagctactagggaggctgaggcaggaaaatcgcttgaacctgggaggcagaggttgcagtgagctgagattgtgccattccactccagcctgggcgacacagggagactgtctcaaaacaaaacaagacttgaaacaggcatgagaggcagctatgtggctgtgagagggagagcattccaggcagagggaagggcaagtgcaaaggccctgaggcaggaatgtacttgctgggttaagagacagcaagggggctggcgtggctggagtgggattagtgggagagccaggagtggggggagggtggcgggcagggcaggagatgaggtctgagaaggagagtagtgagggaaggggctgattgtgccgggttgtgggggctacagtgggattttggcatttgctctgcgtgagctgggagttgtgggaggattctgagcagagagaaggggagtgttccactgtataacatgggttgagcttgtgttacggccaggaacacactccccctgcagtctctctcctcagtgctcccacccccctaccacattcactcacccacctttgcaccgaacccctatagggcgggcacgaggaccaggagatgggtgtatggggctctggggtctaggagagcctgagcagggatctgggggacctcagtggggaggggctccatccaaacctcaagccccctcctgctgatggccctctgttatcccggtgggtgcaccctctccactccaccaacagcccaggcatggccttaactgcccctgccccccgcccctgtctgcttcccaaacactgagccatgggctaaaaggaactggaggatggtggggggcagcgcttccctgtcctggcatgggccccaaccctggcctcccacctcactcacctgcagctcctggaacagcaggttggccacgacacggtggcagagccgggtcacatggtccagagcactagcagatgcttcccgggccggctcgctttctgggggccccacccgggccaggcgctcggccagagctctgtggggatcaacagagccaaaactgagggaccccaacatctcagcccaactgcctaggcctgtcttcccttaggtagatcagaggggcacaggggtgacaggtcagatggggggctgagaaaggtcagggactctggagaggggtcaggggatgcttgacaggttgggggtgtctggggattggggtgtctggggacgtcaggggactcatggatgttggggggctgagggatggctaggaggtctagggtatattgggggagggaaggggggtctctctgtgtcttcgggtctcagtttctcttggtgctttctgggtgagagtgtggaggcctccattctaaaagtctgtggttcttttttttttttttgagacggagtctcgctctgtcacccaggctgcagtgcagtggtgccatcttggctcactgtaagttccgcctcccaggttcatgccattctcctgcctcggccttccgagtagctgggactacaggcgcccaccaccacacccagctaattttttgtatttttagtagagatggggtttcaccgtgttagccaggatggtctcgatctcctgaccttgtgatccacctgccttggcctcccaaagtgctgggattacaggcatgagccgccgcacccggccaagtctggggttctaatggtctacagctctgaaactgtacccttactcttctctttttttttttttttttttgagacacagttttgctcttgttgcccaggctggagtgcagtggcgcgatcttggctcattgcaacctcaacctcccaggttcaagtgagtctcctgcctcagtctcccaagtagctgagactacaggcacccgccaccacacctggctaatttttgtatttttagtagagacaggttttcaccatgttggtcaggctggtcttgaactcctggcctcaagagatctgcccaccttggcctcccaaagtgtgggattataggcatgggccactgcatcctgccccggccatttattatgattactattatttgtaatacaaatggtagaatagtatacccacttctgccctttccttcaacagcttggagacttttccgttagggcatgaagagttctcacgctcctttttaacatctgaactggattccactgcttagctgtcctatcatttatttaactggccctcgatagatggacagttggttccattttttccagggaggaaccctgcacatatgtcatatcccatgagcttttggcctctgaagggtgcattcctagaggatctgctgggtcaagcgcccagtgtttgtgatttgggcagaaagtgcttggtctggactgttctccattcggcaatggaagaacacagactgctacaatgataggaaatgggaatggccaggcaaggtggctcatgcttgtaatgccagcattttgggaagctgaggcaggagcatcacttgagcctgggagtccgagaccagcctgggcaacatagagagacctccatctcttttattttcttttttttgagatggagtctcgctctgtcacccaggctgcagtgcagtgacgggatcttggctcactgcaacctccacctcccaggttcaagcgattctcctgcctcagcttcctgagtagctgggattacaggcacctgccatcatgcccagctaatttttgtatttttttagagatggggttt[133 bp omitted]ttttttgagacggagtctcgctctgacgcccaggctggagtgtagtggcgcgatctcagctcgctgcaagctccgcctcccaggttcacgccattctcctgcctcagccttcggagtagctgggactacaggtgcccaccacc[171 bp omitted]taaactaatcaaaaaggataaaaaggcaaaaaaaaaatctgtcattcttttttttttgagacggagtcttgctctgtcttccaggctggagtgcagtggtgcgatcttggctcactgcaagctccgcctcccgggttctcaccattctcctgcctcagcctcccgagtagctgggactacaggtgcccgccaccatg[175 bp omitted]ggcgtctaggattctgtaattcgaacactccaatattcggatgctctgtggtgctatggctgtttcaaggactcccagattttatgcgtctaaggtcccatgctcagactcccctgagtcagttctgcaatccccacccaggatccgggcatcccaggtcagcttccaccttggattggtcctccctccatcacaccatggatgccctcacctcagtggggggccgcagttgaccagggcgatggtcttgctgatataggtgtcaggtagcatctcccggactgctgggttctcatggaatcgctccacacgctgctggaagctggtgggaggaaaggggacagatagggcgccactgggtcagggtccctcgtgggcacccagcctgccaaagccaccatccctgcggtggcactctacctgtcctcaggtgactccctctcatctctcctctctctattggatcccaggccctgatgcccaacccccagcagagctaacctgtgctcccaggttcccctacctctgcaggaactctgccagcccgcctaggcagcagtgggccatccgctccccaaactcctggctgatgcggggtgctcgctctgtgtgctcttccagcagctgtgaggtccagggcgacaagaagaggtgaggaggggcaaggtcccactttccatccagcccatcccccagcctccctccacctcctacctcacacacatcctgggccaggctgctgggctggtcctccaggctcccccagtgctcttcgtcctcctgcagcacacggagaagggcagcccgggtctgagcctacagtagggagaggggagacaggcaggagttgggggcggcctggaggtctttttttttatctctttctcccaccacaatcccctagcccttaaccccaagcagttctggattctacctatgagcttgtcaaggtgatgctggggagggaggctgagccagaaaacttctgcagcccttcccactcctaactctgtggtttggaacttcatattaaaagtctggtttggccaagcgcgatggctcacacatgtaatctctttgggaggctgaggttggcggatcacctaaggtcaacagttcaagaccagcctggccaacatggagaaaccccgtctctactaaaaatacaaaaattagctgggcgtggtggtgcgtgtctgtaatcccagctactcaggaggcagaggcaggagaattgcttcaacctgggagacagaggttgcagtgagtggagatcatgccattgcactcccgcctg[138 bp omitted]acggtgaaaccccgtctccactaaaaatacaaaaaattagccgggcgtggtggtgggcgcctgtagtcccagctactcaggaggctgaggcaggagaatggcgtgaacccgggagacggagcttgcagtgagccgagattgtgccactgcactccagcctgggcaacagagtgagactccatctcaaaaaaataaattaaaaaataataaataaatagataaaataaaattagtccatggttttaagcttcctccatctaataagcaagggcttaattgtgtgtgtgtgcacgtgtgtgtataattaaatatatacatatatttatgtattaaatatatacatatatttatgtattaaatatatacatatatttatgtattaaatatatacatatatttatgtattaaatatatacatatatttatgtattaaatatatacatatatttatgtattaaatatatgttatatatgtaatatatttatatattaaatattagtataagctatataatgtgtatattaataattcataatacgttatttatatattaataattagtatgtattatatactatagcacatgaaatatgtaatctatattaacatataaatattaaatataaatcaataatacatattataaataatatattataaataatatagatacatgtgaccaggtgcggtggcttatgcctgtaatcccagcactttgggaggccaagatgggcagatcacctgaggttgggagttcaagaccagcctgaacaacatgtagaaaccccttttctactaaaaatacaaaattagccgggcatggtggcgcatgcctgtaatcccagctacttgggaggctgaggcaggacaatcacttgaacccgggaggaggaggttgcggtgagccgagtttgtgccactgcactccagcctaggcaacaagagtgaaactccgtctcaaaatatatatatgtgtacattataaataaagctataatataatatattattgtatattatttataatatacacatttatatgttaatatgtatacacaaataatgtatacttaatatttatattaaatataaatcctattattacatattatgatatgtatgaagtattatttatattaaatattgtttttctttagaggccacgtcttgctctgtcccccaggctggtgtgcagtggtaccatcatggctcactgcagcctcacactcctggactcaatcctcccgcctcagattcttgagtagctgagactacaggcacgtgccaccacacccagctaactttt[136 bp omitted]ctgcctcagcctccagagtagctgggactataggcacccgccaccatgcccagctaattttt[166 bp omitted]caggctggtcttgaactcctggcctcaagaaatcctcccacctcagcctcccaaagtgctgggattacaggtgtgagccaccgcgcccggccaagggtctatgttttattgtcttttggtcccaagactctgctctcaggttctgccaaacagttagtttaagattctcagattctgtgtttcaagaactccaaaggctgggctgcaaaggttctcacatctctgattctctgatcaaatgtgttgtctcggctggggtgactcatgcttatactcctagagctttggaaggctgaggctggaggatcacttgaggccaggattttgagactagcctgggcaaaatggcaagaccctgtctctgcaaattttttttttttaaattatccaggcatggtggtgtgtgcctgtaatcccagctactcaggaggctgaggtgggaagatcccttgaacccaggagttcgaggctgtagtgagctgtaatcatgccactgcactccagcctgggcaaaagagggagacatctgtaattaaaaaaataaaaaagtataatcctcaatttgatgagtttaaggatccagatctcttttctatggttctaggctcttaagtagcattgactgatttctgtggctggaagtaggactggaattgagacagcaaacatcactgtagccggggacggcgtgcatggctgggccattctgctcagcggtgtctgtgcaggttcagtaattaaccatgtttattaccagccctgcttatatgtgaagatctttgtcagccaggcctgatggcacgtgcctatggtgccagctactggagaggctgaggcaggaggatcgcttgagtccaggaggtcaatgctccagcctggcaacagagcgagaccctgcctcaaaaaaaaaaaaaaaaaaaaaatctttgatgctatacttctgtgagtctttgggcctgtgagctgtagttctgtgactaactttcttgtactctaaggtttgaagtgtccagatatactgaacctttaccaagtgtctctgtacagcggcctttgtgtctatggcacatggatagaactcagaagttcgtaaagggaaaagggagttggaaagagtgaaaggtggaggggacaggcttcccaagcccactgtgaccccctccctccacagcacctcctgcttccaaaatgcaaagttccaggtaccttaacatctgtgacgcattcatcctccaaaccccgcagggtgccaggggagagaaggggccccagctccccattctccagggcggccatgtccaccagccctaggacctctctggggatgggggtgagagaaaaggaggtctgtgaaaagtggggctgggcagttggaaccttccccacaccctcctacccactgtttctgtgaccctgggccactcccttcctctctctaagtcatctctgctcatccctcagaggaagtctttggaattgttgcttccccggctccagctctctgagtcagctccctgatggatggtgtcccggcatgatatttaggggtcaagtccaggcttgaagatctgacatgcaaggcttcacccatgatccatttcaccagacagaagttccctttgcacctatgctctgaggccctgctgccttacctggccttggaggcttccccagtccagccctctctccccaccttctacgagcttacatgcctggagctatgtgatatcatcaatatccacccccaaacaccccagacttgggctcatggcatcctctcaattataaacaccattgccctacaaattggaccaaacccagttcccaccactttaggaagctttccggactccctatcctgcctccatcccttatagataacatgagagcattattgacatacattcccaaatgagatctatgtggtcaatgtgggtatctgttgccttcccagtcttccggtgacagcatcctgattttgttggaagaaccacccacccccttcactgtccaacgtgtggcttggatgtggctaactcccttttctctggggtagacaggtgacctggaggtggctaatcaccatagtccatcccccggccacaagaatgggtatgttttaggacacaaagtctcaacagtaataagattctaggactgagagggaccatggtactgaggttctgggtgctacccttatagaattcaaggggcaaacagcactcaagtcctaaaactggcccgggcatggtggctcacacctgtaatcgaagcactttgggaggccaaggtgggtggatcacttgaggtcaggagttcgacaccagcctggccaacatggtaaaaccccgcctctactaaaaatacaaaaaaattaggccgggcacagtggctcatgcgtgtaatcccaacactttgggagttcgaggcaagtggatcacctgaggttaggagttcaagaccagcctggccaacatggtgaaaccccgtctctactaaaaatacagaaattagctgtgcatgatggtgggcgcctgtaatcccagctactcgggaggctgaggcaggagaatcacttgaacccgggaggcggaggttgcagttggcagagattgcagcactgcactccagcttgggcgacagagcaagactccgtctcaaaataaataaataaataaataaataacgtcctaaaactagaaggatcaacagtgttgaggttctaagaccaaaagagggaatgaggctaaggtttaggattcaaagcttcattggtactaagcttctatggttgcaccatacattctaagttctaagattggaaacgtcaacagtactaatgccctaggctctaaagagaaagcagtgtaggattctagaattctaagtgtcattgtattaaggtgaagggtcagtggggctatggttctaggaaggaatggtcaacagtgctaaaactctaagactggaagggtgaacagctaagattctagtagcgtaagtgtcatgaagcccaggttcttggactggtgggcccaccgtgctgagctactaggattgaaactgtcgatagtgctaaaattgtagaactggaagagtcaatggtgccaataggttctaggtctgaaagggtgggaatgctaggattctaagactggaagcatcagtgttacttagatgctaggagtgtaactgtcgatgatgctaaggttgtatgtaggtctagaagaatgaatggtgttgagattttaggaacggaaaagtagcaacgcaaaggttctaggactagaggaatcaatggtgctaagattcggggactggaagggtggacagcgaggcgatctagagtgtaagtgttgacagagcgctgaggtttttggaccacagtggtgccggagctcttattctaggactgcaagcgtccatggtactaaggtgctggaaccggaagcctcggtagcagtgagagtctaggattgtaactgtcagcggtgctgacgactggatgggttaatggtgttaaagtgctaggactgtagggtcagctgtcccaaggtccttaaggtctgaagaagccagtgctagggggtagggctgagggtttcacgtgaccttgggcaactgagtccagcttacctggggtagacctgattgtgccagtgcagcagcgcgtagcggtcggccagcggcagcctgcgacgggcggaggcccccagccactcggccagggccccgtggtagccgcgcaggtagacgccgaaggcgcccaggccggcggggtaggcgggcgccaggcggccccgcaccacggccatatcctccagcagccgcgcccgcagcgcctccagctgcccggccaggcccccgggcgccccgggagccgctgcctctaggcgctcccgggccgcgcgcgccacggcttcggcccagcgtgcgcgtagtttgcgggccgccccgggaccccgacgcccgtcggccgcctcctcctgtaccagcacctggcccagctgcgccaccgcgccagccccggcgcacgctcccggcccggggcccgccagcgtctcgcgcaccagcgcccacagctcgcgctgcagggcctcgtacagcagcgccacgtcccgcgcccggcggcccccgccagcgccctcggccttgggaggcccaggcgcgccgcccctcgacggcgccagctcctcggcctctagctccaggatgtgctcgtccgcacgcgctagttcgcgctgctggatcaggctcaggatctccagcactgcgggagcaaagcgggaggtcagcagtgcgcgggggggaggagggcgatgccggacgcggggttgggggtgcttaggaaggggagagagatgaggggaaaagggttacaggaggcgggaaagtgtgggggcagagaagagcccggagaagagcaagaaagaaggatgttgagtgaaggatgtaggggaggggtcagggtgaggggctcatgcttgtaatcctagcactttgggaggccgaggccggcggatcacttgaggtcaggagttcaagaccagcctggccaacatggcaaaacctcgtctctactaaaaatacaaaaattagccaggcgtagtggcgtacacctataatcccagctactcgagaggcaggagaatcgcttgaacccggaaggcagaggttgcagtgagccgagatcgcgccactgcaccccagcctgggcaacatgttgagcgagactctatctcaaaaataaataaataaaaaagagagagggggaaaagaaaaatgcctgtgactgaggaggggatctggggaggttgcagggcggaaaaatggaggaggggtcggaggaggcgagaaggttgagagaggagccacgtaagggggagagagatggaggcagccggtgggagtaggaggggcagggtggtgacttggagatggggagaggatatgggaccactgatggggtctttttggggtggggatggctgtgggctgatctggccctctgatgagttcagactgcctcgagaaaggcgagtcgggctggaaggcctctgaggctgaaggagggtcctggcagcccagggttaccctcgacacctccacccccctccacttcctccctggcagagaaactatttcctggccagcgctatttctgcccatccgtttccagaaggcggggctctagtcaccccctcctcacctccctccagtgccctcccagtccccagggagctggggctgaaatagcctctggccagaacgtggagggcatcagaggacagaaaaggctctcctgaggtccccagccctggagcagttcgggcctcggggctaaaagccgggctcaggcacgggagcagagataaaggcagggttgggggtggcggtgaattaagatggggattgggacacggatggggatagggccggaggtgaggatggggtgaaggtgggggttgggatgagggagtttagggttaggatgaggtcaggtgggagtctggacagaaatgggaaagaggcaagaatgacattggggtctgggtagggatgaggttggagaggtgggggaggggaatgtaggtgaaagctgaggatggaaaggacataaagattgatgtgaaggccgagtgcggtggctcatgcctgtactcctagcactttggaaggtgggcggatcacctgaggtcaggagttcaagaccagactgaccaatatggtgaaacctggtctctactaaaaatacaaaaattagccaggcatggtggtgcattcctgtagtcccagctactcaggaggctgagacaggagaattgcttgaacccaggcggcgaaggctgcaatgaactgagatcttgccattgcactccagcctggatgacagagctagactccatctcaaaaaaaaaaaaaaaaaaaaaaaagattgatgtgagtttgaagatgaattgtggaagtgagttgggcttgggaataggaacatggatggaattgaaaatggaggttggggatgggggtttaggactgggactcaggataggggtgaagatagattagggatgaagaggaggttgcgtttggagttggaattgaaactgggggctgaggaagaactaggaactcaaataggactgaataaggaggttgatggccaggtgcggtgactcatgcttgtaatcccagcactttgggaggctgaggcgggtggatcacctgagatcaggagttcaagaccagcctggccaacatggcaaaaccccatctctacaaaaaatacaaaaaaaatttagccaggcatggatggtgatgcatgcctgtaatcccagctactcaggaggttgagacaggagaatcgcttgaacccaggaagcggaggttgcagtgagctgagattgtaccattgcactctagcctgggcaacagagtgagaccctgtctcaaaggaaaaaaaaaaaaaaaggaggtcgccagagggaaatgggtggaaggtgggtgctgagaggggcctggggttgggggttaagagtgagaccaaaagagtttaaaagggtggaaggtgaacatggggaagaatgggatatgaaacggggctggaccagttgggggttgccatggtgttggacatagacaatgacattaaagatggcgtttaggccaggcgcagtggctcatgcctgtcattccagcactttgagaagctgaggcaggaggattacttgaagccaggagttcaagaccaacttgagcaacatagcgagacccccatctctacaaaaaatgtgaaaattagccaggtgtgatcatatgtgcctgtagtcccagctactctggtggctaaggtgggaggattgcttgagcccaggaggtcagggctgcagagagccatgattgcaccactgcactctagcctctagcctgagtgatagagcgagaccttgtctccaaaactagatggcatttggaggaaaggatgagctgtacgagaagcatacggatgtgtctcagatagagactgatggtgggcttggaataagtgtggggtgagaacagaaaaggcactgaggaagacactggggcttggagtaggaatggggactgaggatgaagacagggtggtgttagggattgaattacgtccccccagaaaaaaaaaagatatgtgaagtcttcaccccagtacatcagaatgtcacctgatttggaaatagggtctttacagaggcaatcaaattaaagtgagatcatagggcagacccgaatcccatgtgagtggtgtcctcataaaaaggagaaattggccacacgccgtggctcaagcctgtaatcccaacattttgggaggacgaggcaggcagatcacttgaggtcaggagtttgagaccagcctggccaacatgatgaaaccttacctctactaaagtacaaaaattatccaggtggcacatgcctgtaatatcagctactcgggaggctgaggcaggagaattgtttgaaccccagaggcagaggatgcagtgagccaagattgcaccactgcactccagcctgggcgacagaggcaaaaaaataataataataaaataaataaaataaagaaattgaagaaattggggatagaaagagaagggggagagatgggaccaaaatcaggtattcccttggctttagacatgggagtagggctgaagacggcaggtggaggaggcaaagattgagggtgggcatatattaacaggtggcactgaagagaaaggttgacgacagggattaggactgcagtggtaatgggttggagctggcatggaggtgggagatgtgagttagacatgtgaattgcaggtcggggtcacaggtggtagctgggatgggcttaagtatgaagcctgggaccaccagggctggggatggacatgggcactgggattctcccaggacagggtcagggctccggactcacctgacaatggctccttcatctttgggggctctgggaccttgggtgggggctctggagctgcctcgcctgcaggcaccactctctcagccagggacgcacgctggggcttggatccacgccccagtctcaggaaggccagtctccgggcggcctcccccgctgcctcctcgtcgccgtgggctcgggtcccatgcagccgggccaggaggccaaaatctgctgagctcctgcgtatccctggtaccagcacacggcccaagaaagagcggggctgcccatccccagggctgcctgcccgccggcccggggcccagcccagccggaagggggccaggcccgcaagcttctccagggtggcgcggcggcgacaagatgttccattggggagggaccccagctccccggcctcttcttcctccagccctgaaacttcttcaaaggggttccgagaggacctcaggggcagggtccccgcccggggcaccttagggtctgacactcccagattcttcaggataggcattttgacaggtggggacctggggaaaaaaataatgaccatgggcgatgctgatgacaatggtggtatggatgacggtgcctctgtgtaccgagcactttggggtgagcgtaccagacacttgcctgagcacttaataagcccttgatct[135 bp omitted]tgcctca[222 bp omitted]tcacccaggctggagtgcagtggcacgatctcggctcactgcaacctccgcctcccaggttcaagcaagtctcctgcctcagcctccggagtagctgggactacaggcgcgcgccaccacacaaggctaagttttatatttttagtagatatgtggtttcaccatgttggccaggctggtcttgaactcctgactcaggcgatccacctacttcagcctcccaaagtgctgggattacaagagtgagccacctctgctggcctggaatattctctatcttaagttgatcctcctactccgtggagaaacaggctgagaggggggaaggctccctcccaagatgacacagtcagtcaagggcagagatgatatggggactcaggccctaccatccacccagacgtccagggcagactcctgagcacctgcctacaccccctcatccccttcatttctcctgtttgatttgtacccttgtcatctctccctcattcatctcttcagcaaaaacttattgggaaatgtctagaataggcaaagcctaattttttttttttttttttttgagactgggactcaccctgtcacccaggctggagtgcaatggccccatcatagttcactgcagcctgaaactcctgggctcaaatgatcctcgtacctcagcctcctcagcagctgggactacaggtgtgtaccaccatgcccacttaattaattaattaatttatttatttatttattgagacagggtcttgctatgttgcccaggctggtctcaaactcctggcctcaagggatctatccacttctgcctcccaaagtgctgggattacaggtgcaaatcacctcgcaggtctctaggcaaatccttagagacagaaaggagactgacaataggactggagagaacggggaatggcgagtggctgctaatggatgcagggtttccttttggggaaaggaagacactctggaactagataaaggtgatggttgtacaacactgtgaatgcattaagtgccacttaattgtatgcttttaaaatggcttaaggccaggcgtggtcgctcatgcctgtaatcccagcactttgggaggtggaggcaggcagatcacctgaggtcaggagttcgagaccagcttggccaacatggtgaaaccccgtctctactaaaaataaaaaaagtaaaaaattagccgggcgtggtggcatgcacctgtaatcccagctactcgggaggctgaggcaggagaattgtttgaacccaggaggcagaagttgcggtgagctgagatcacaccaccgcattctggcctgggcaatagagcaagactcagtctcaaaaaataaaataaaacaaaacaacttactaggtattagccatgggcccagccctgtgcaggcgttagggacacagcagtggccagggcagcccccatccctgccattacagcttcctgagtcctgcccattccatctcctaagcctctcttcagtctgcgctccctcctttcactcacttcccatagcccctaccccaagcggaacccttgcccacttccctgccctggcctcctccctggtccccagcctctagtcttggcacc[145 bp omitted]aaaaatacaaaaaattagctgggtgcagtggcaggcgcctgtagccccagctactcgggaggc[137 bp omitted]cctgctcttctccatctcctaagccttccatggctccctagtatcttcaggacaaagctgaggcctctcaccacagccttcatgctctggcagctgcacacgtcactagtgctgtcccgtagcctcctccttaccccaggaacctccaggtttcagcatctgctggtgcttctacatagacgcctgttctccatgctccagtcaggacttcaggactcacacttcaggactcagccccatgccccctcctccaggaagccctctgtgaccctcaggctcccagtccctgggttcccacacctcacctctgcctgctctgggtcatccctgtctggggacagatctgtgtcccttactggactgcaaacctcagcaggacagggctggggctgtctcagtcaccactgtgtccccagctcccagcacagggcagacactcagggaatgggtgctaaacaggaaatgaaggaaggaaagtggcaagacagttcattccttgtgtggggaggaggagggtgagtcgagctggaagaggtcactagggagcaggccacgcagggctttaagttccttgataagggacaggctttcttccaagagccctgcagagccacagataggtgctttttaaaacaatgaaatagttcaaacattcggaaaagtacagaagacaagcttaataaacacttctgtgcctacaatcctagccacagctcacacaatcatttgctctcttagttcaggtttttgttgttgcttttgtctttagagacaggatctcactctgttgcccaggctggagtgcagaggcgtgatcatggctggctgcagccttgaactcctgggctcaagcgatcctcccacctcagcctcccaagcaacggggacatcctgctaattttattgtttaattttttgttatagatggggtctcgctatattgcccatgctggtctggaactcctgctcctggcctcaagcaatcctccctcctcggcctcccaaagtactagaattacaggcgtgagccaccatccactgccctgatttttgttttaaagaacaagccaggcgcagtggctcacgcctataatcccagcactttgggaggccgaggagggaggatcacctgaggtcaggagtttgagacaaacctggcaaacatggtgaaaccctgcctctactaaaaacacaaaaattagctgggtgtggtggcgggtgcctgtagtcctagctacttgggaggttgaggcaggagaatcacttgaacccaggaggcggatgctgcagtgagcccagactgtgccactgcactccagcctaggcaacagagcgaaactccatctcaaaaaaaaaaaaaaaaaaaaagaattacaaatgcgtgcagcctcctcctgccacctctcctggtcccactcgctctggccttctcctaaggaatccagcatccagaatgaatgtgctgtttacccgtccaagtagatttttatcccatgctccatagacttgtatccagaaataatatactgttctacatggtttcaaactctctataaatggtatcatactatttgtatcttgcaacttgctttaaaatttatttttttgctcacgttatgaacttgtgagaatttatccatgtctagccatacagctccagttcatttaagtgctatgtaatattccactatatgaattgtgtaaagggtcagatgttcacttgttcttctattgctggacgtgtagcttgtttgtcaccacgacagggttctgagcaggtcaggacagggtcaggattatgcagacgtgcgggggtggacaggaggcctgggaagagggtggtgtgcaaaaggcctgggttgcctaggttatgagtaagagcacccctttccatgatggggaggccccttctttctttccctgtttcaacccctgagctgctgcttctcaaccctccagttcctagaaacgctctcggacctccttccggtctccatgggcccccgcccccacaggaggcagtcaccatgacgaccccttgcctggagcccccatggctgtgtgcaatagatactcccccatgcacacacattatttgcacactcatttctcttctattttattttattttttcagatggagtctcgctctgtcacccaggctggagtgcaatggcgcgatttcagctcactgcacctccacctccagggttcaagcgatttctcctgcctcagcctcccaagtagctgggactacaggtgcccaccaccacgcctggctaatttttgtatttttagtacagatggggtttcaccatattggccaggctggtctcgaactcctgaccttgtgatccgcctgtttcagcctcccaaagtgctgggattacaggtgtgagccaccgcactctgtccttctcttttattttttagacagtctcactctgtcacccaggttggagtgcagtggcatggtctcggctcactgcaacctctgcttcccaggctcaagcaatcctcccacctcaacctcccgagtagctgggagtacaagtgcaagtcaccacacctggctaatttttgtatttttagtagagatgaggtttcgccctgttgcccaggttggtcaactcctgagttcaagcgatccacctgccccagcctcccaaagtgctgggattacagtcatgagccaccacacccagccttgatttctctttcatcctctgaactggcatccacatgcctcatcccaaaatggctccatcatcccccctccaccccataactgtctccatcttcctctcaaaatttcaggctcgaatttccctccaattgaagtcaaccttgcccggactacatctgactttcccccacctggcttcaatatcgcctccaaactggatccaacatccccaaacctggctgcaacattttcccaaaactgtctccgacgtctttccccttcctggctccaacacccgcctctgcaaactggtgctgacatcctgccccctccaaccctctgtctgcctcccagtgcccagcccctgactcacttccgaggcatccctcaagcccccagcctctcaggcccgcaggatgtcttggccaccagagcttccctctttgagcccctcctcctcttcctcactgccagccttttccccggagtccctaaccttctgcagcggccctgacctcggtttgcggaatccatcacctccaacgctcagcatctgtattagagaacggtctttccatatggcatgtccccaagcccaaccccaaccagtgcaaccccaatctagtccttgaccccaaacacaatcctgtcatcagcccagaccactgcaagctcatccacatctccaatcccaacctgatctcggtctctcctgcttgatctcaatccctacctggtccctgtctcccatctccgagaccccatctcttgggatagaacaaatacccgatccttcctggcctcagtcttcccgcccagactcgcaggacattcgacccaatgtcatctcatctctattctcctttggtggcaccaaggtttctaatgctcccttgcaccctttgtggaccccgcgagtcctcaaattctcccctgcaccctcctctcattttcatctcctttctgccttctcgccagcacccctctggagtcaggccccagattctctctttgcccccagcctctgctgggttcaaggtacaggttctcatcagctctggtccagtgcaactaagggcaactgttttcccagttgccctggggaagggggaccccttccccctgtccccagcacactcacctctgtcctcctgcccgtccttctgttcccgctgctgtcctgtccccaggctacttcagccaggactgctgggagcttggatctgagttgggggggtgctcggaggaggacaatttcctgtcaggaaacccctccctctctggggccaggggcgggaaggactcattatctgtctgcccttttaggccaggctgcggttgggctgggaaggccgaggcccacagctgggcccccaccctcacccccgctccaggccggaatccgcccactcctgcatgctcttcacgcctcccaaggtgacaacaccatcctgggcgccccggggagacaccccaagctggacgccagcccagagctgctctccagcatgggcaagccccgaggccttagaatgagaaccggggggcaggcacgcatctctctagagttccctgccacgggctgaagaccaggagggaagttttgctgggcccaggggctggggagggggacctatggaggagggcactggacatggctttggaattgtggttctctttgtctagaagcccctgtacccaggtctctgcatgaggccctccttttcatcatcccagttccagccccacagtctcttcctctgttctccactgtcccgtctcacagagtcgtcactctgctttgtcaatttatttttctttttttttttcctgagacagagtcttgctctgttgcccaggctggagtgcagtggcgtaacaatagcttactgcagcctggatctcccagactcaagagatcctcccacctcagcttcctgagtagctgggactacaggcatgcaccaccatgcccagctaatttttgtattttttgtagagacacgggtctcattaggttctccaggctggtctcaaactcctggcctcaagccatcctcctgcctcggcttcccaaagtgctgggattacaggcgtaagccactgtgcccagcctgtcaatttctttattgcaccttctacaatctgaaattatcagatgcaactggattccttgcagataaactcagcaaagctcactttgttgatcctgttcatctttataagcctagctgcgtgcctggccctcagtagtcaagatttaaatgaatttaaatgaagctgagggttggaggtgggtttggagatggacttcctgctagagttgggatgccaagtgaagtgagggctggggctggagctggtgctgggtggggttgggtatgagagtcagggttactttaaaaggctagggccatgtgtggtggctcatgcctgtaattccagcactttgggagccaaggcagggggattgcttgagcccaggagatcaagaccagcctgataatatagcaagaccccgtctctacaaaaaaaaaaatttttttaattagccaagtgtggtggcacgctgtagtcctagttactaagggagctgaagtgggaggatcacttgatcctgggaggtggaggctgcagtgagccatgatctcgccactgcgctccagcctgggtgacagagagagaccctgtctcaaaaattaagaaaaaaaaaattttttttaaataaataaaactgggctggttgcagtggcttatgcctataatcccagcactttgggaggccaaggtgggtggatcgcttgaggtcagaagtttgagaccagcctggccaaactgatgaaaccctgcctctactaaaaacacaaaaattagccaggtgtggtggtgcatacctgtaatcccagctactcgggaggctgagacggaagaaatcgattgaacccaggaggcagaggttgcggtgagccgagattgtgccactgcactctccggcctgtgagacagagtgagactccatctcaaataaacaaacaaacaaataaataaataagataaactgtgttcaagtgctcaggcacagcctgagggggatgcgtgatcactggcctaggcaaagtccaggctgggatcagggttggggtcaacattaggatcgggggctgggcttagggatcacagctccctcctggatccaagggttaagattcaaaggtctgaatgccccagttgaaggaatgaattcaccagacataggttgtggaggaagggctagctggatgaccaggtcgggaggcagaggaacaggccttgccccccagctcggcctctgcaccgcggacccatggtcagcagtggcccatcatgtactgggatcgtgcaggatttccaccccgccttatttatttatttatttatttatttatttagagacggagtcttgctctgtcgccaggctggagtgcagtggcgtgatctctgctcactgcaacctccgcctcctgggttcaagcaattcttctgcctcagcctcccgagtagctgggacgcaggcgcttgccacctgcaagcgcccggctaattttttgtattttttttagtagagacaggttttcactgtgttagccaggatgatctcgatctcctgacctcgtgatctgcccgcctcggcctcccaaagggctgggattacaggcgtgagccaccgtgcccgtccccctcctttttaaaaattattttttttattttgatttagagacagggtctcactatgttgcccaggctggtctcgaactcctgggctcaagtgatcctcccgttctggcctcccaaagtacggggattacaggtgtgagtcaccgcgtccagccccctttttaaattttattattattttttattgaaatacaattcacatacataagagtcacccttttcaaacagagtccggtaggttttagtatattcacaaggttgcagcaagcgtcaccactatttaattccagaacattctcatcaccccaaaaagaaacctggtacccatcagcagtcatttctcattccccagcctccaacccctggcaaccattaatctactttctgtctatggatttgccaattctgaatatttcatatgaatggaagcatacagtaagtggtcttttgcgtctgacttctttcgctaaacatgctgttttctttttttcttttttgagacggattctcactctgccgcccaggctggagtgcagtggcgcgatctcagctcactgccagctccgcttcccgggttcacgccattctcctgcctc[212 bp omitted]ctgtaagcctcggtccccccacatctgggaaatggggtggggacgctgttggggaagggagggcaggggtggaccctggagtgtgtggggcgcgtgtagggaggtgatcggctgcccccgtgtggtgcacggtagaactgcagctctcagcgccaatgcagggaacgggttgggggcgctcagcccctctagcctacccccaagacccccactttcaccctgcggcgtccctgggatcacagtacgtctagaacactaccccggaactccaccctctctgccactgtccctgaggctcctcgggccatatttgccaaatagtaataataatgtccccacatatgaattttgaatctggtcccctgtgaagcactttactcaaagattctcatttatttgttagcagtaacattaaaataacaaataaatataaacaaattgacaaataaaaatagtagcagcctgaggttgctgctattatttttcggagacaggaaaccacagtggttgagagagggtccaagttctggaacttgggagcacttggattcaaattgtagccctgccactaatttgccgtgtgaccttcagcgtgtgacgtttctcccttccttgggcctctgtttcctcatctgcaaatgggattgataaagatgctccctacctcttggggtggcagaaaggagaaactgctcagagcctggcacaagggcaactgccatgagtctgtgttgctcatagtatcaagcagtgctgtgctttcacaaccagcttttggctgagtgcagggtagtcccagcactttaggaggccgaagtgggaggatcgcctgagcctgagagttggagatcagcctgggcaatatggctacaaaaaattagctgggcgtggtggtgcacacctgtagtcccagtgacttggtggggctgagctgggaggattgcttgagccggggatgtccaggctgcggtgagccataatcgtgccactgcactctagcctgggtaatgcagtgagaccctgtctcaaaaacaaaacaaagcaaagcaaaacaaaacacccccagctctctgcaggtgggggtgtggagccttaatttgtagcatttgccaatttccatggtgtaaatattcccaccatggctaatttcaagctaccaaggtgatatcacatggcatttttgccccccattatatagtaattttactgtgcagctacaatagacgtaggtaacctcaagatcacagataatggcaaatgtagtaagataactaggacgtgatgagtatgtattacttgtacctttaatgtaatttaattgtatgtttgcataatttaatttttaataatggctgtgtttaacaaccagttccaaaattcctgagacataacaatcagctcgctccagccagatccagcacactgctgttttagaaggggaaactgaggctcaggaaaataagcctcagatagaagaaggcagggcacagaccccttcccaaaaccatgtgactcccaggccaagactatgtaatgcctgtctttctttcatcccaccctggtccacagagcatggatggtccccacagcgctgtgtggcctccgagaggctcttgtcctctctggtctcagcctgcccgcatggggagtggctgtgccctgcaggcgaatacctgcacagggttccttcgcacctgccagtgagcaacacacggattcttcctttcactttacaaactgggaaagtgaagcccagaaagggcaagtgcttgccccgggtcatacaggtggacagagagggtccccacaccccagctggggtgcaaaggagtggatgctgcagccccaacctgcgggtctggatctatgtggctgagtggaggcagcctgactagggaggtcactgagccctcagcagtggccaagccccgcacaccatccccttcacccaccccacccttaggcctccgaggggagagcttcccccgctcccccccgccaactggggagagaatgggccagggggagggacaatgtgggcagcgcctctggggtcttctctggctcagtccctttatctctatctcttcacagatctctgcgtctctgtatctctttgtctctccctgtgtgtgtgtggggtctctctcagtctttgtccctctgcgtctctgggtctctctgtctctgtctccctgcgtctctctctctctgtcatctggctcttccttcatctccttgcgcctctccacccttttgtaactcgtctctctctcttcgtgtctctctatctctacgtctctcgatctctctctctgcgtctctggcgctctgccccggcctctctctccccttctctcctctccagtgcgcctctcgtctcgggcgagaacacgctccccgccggcgtgcccagacccgcctccgcccccggagcccccggagcccccggcgccccgaccagcccgggcctgcgcctttaagggccggcggcggggggcggggtcccggcgccccgccctgcccgcccctccccctgacgtcccttcctccctccccagcccctccaccgcctccctccgccgccgcttgggccggctccgcgccccctccgcggcccccgcccgcccgcctgcccgccgcccccatggcgcccggggtccccgctgcacggggccactaggaccctcggcgtcccttcccctcccccgccctgccccctctcccgccgcgcggacccgggcgttctcggcgcccagcttttgagctcgcgtccccaggccggcggggggggaggggaagagaggggaccctgggacccccgccccccccacccggccgcccctgccccccgggacccggagaagatgtcttcgcggacggtgctggccccgggcaacgatcggaactcggacacggtgagtggggcccggccccttggggagccctggctgggtccagccgccaaacccttctccccgttgtacccctcgccccgcgagcccctaccctcgtttcctgggcccgacccggctcgtcacctctcgacccctcccggacttccaggcctctccaccctccccaccttttccagcccagcccgacccctgggggcgcccctctctcgggacccctctcttgtccccgtgcagaccgcttccgctcgggtctgttccctccaggaagccccttcccctgcttccaggagcccctcccttctcttgcctgtgctaagccgtttcccctccaggccgtccgcgtccgacacctcgccccctcccggatttgcagggcccctgaccccccaaggcccggccctggcactctcagcagggcctggcccagtcctgcctctggctccggccttccctgtctggggctgggtgccggctccccaggagcccccctcctcttattcccagccctctgcccctccaggacgcacccagggcgcctgtgggcagcccctggcaggaagctggtttccacctctcctgggccccggcccttttctggcttcttcaaggtctctcccgtcccaggcctggtccccatcttccaagcagccctgtccctagatcccagcaccccggggcccccagatgccacctggaccctttctggtctcttcctctcccaggaagccttggcctccaacttctaggccctcacctcacccaggctggtatttctaggccctggaccagtctgactccaggcctcatccgccctctatcaacttctcagcttcaggcagccccttccccaacccccaacctctggaccccctgctaggccaaactcagaccccttccccacaaaccaccgtcctttctcctgccccagggcctcccccttccttgctgggagtctggccttccaaggaagccccctcctcagcttcagaggccttcctcagctacagggcctggccccagatccttcttccagaaaactcctggacctgaagcctctcgtcttgccctggtttcaagcccttttcccttgggtcaatctgctggaagctttctccccaaatttctagaccccttgaccttccccagggctcagcctttattcatctgggctgctccttgcccaagaagttcctaccccatacttccaggccccccagacccttctctggtttcaaggacttctcctagaagcccccttctctgattcctaggagcttccccaagacccagggattcctggcctctgacttccactgcccccatggctttgtcactttccaccattcccaggcgccccctgcccctacactgcttcccagagaggcccctccccatctcctgtgtctctgatcactgatcacttccaaagacctgcccaccacccaatcctagacttctccccacctgggatctttgtggctttctccaaatccttctgccaggtccctgttccccttccccctgtttccctcacctccgacagacccccccacacacacacaccatcagagagatttatatctgtcccttcctcatcttgcagatccctccctcacagagaccaccccgcatcatcactatgggccagaactccaatttggagtctaatgaaatgcctaccacctctgttccttggtcactacaatctacagtgaggtgccaggggctccacagtcctgggttccaatgctgacatggccagctggtttgccttgtgtcctcagacaaccagttctccctttctgagcctcagtttcctgccctggaaaataggggtgaccgcttgagtgcctccaaggcttactcgattcaggcgaaggctggcacctaggaagcactccacaaatgccagctgctattgtggctgtgggtatgagtcagacagcccgtggattctcagctcagggctgttattggttgttgagtgagcctgcagattcactcccagcttgcagcctcagtttccttatctctaaatcgggttgatgatggccccccactgttagggatgtttgcaggagccagcgacgtgatgtgactaaggtgcacagggcctggcatgtgtcgtggctgttgtggttattagcactactttaattgttcagataaacttgggttcacatcctgtttctgtccctccctagctgtgtgacctcgggcaagtaaccttacctctctgagccttggtttccttgtctgttaagtggaacgcctaatgaagacttgctgttccctgggttgttaagatgcgtgcatggtgcggatttgaggatggctaatccccttttctctcctccaactcttgtcactaagacctgcctgtcagtcctggtggggagtcacttgcctgcctctggaatgggaggttgcagccccctctcctgttacctggttaccatggctacagccacgtggggtcatgctcccccaccccaagttccagggccccccaccagggggccagcctccccaggttccctagcaacagtcccgggtgttggggcgccagccgggcgggagggagccaggccagctggtggtgcaggccaattttagctcccacccccggcccccaggggctttgtcacccactgccccagctgcccctcgcaggggtccctcagccatgctgccttcagcgtggtgccatcccacctccagctggctgccctggcgccacctgacagggcttcttctccaggtccttatcttggtggggatcggaggccttatctccaggatctccacctgcctccctggtctctcctgggaagaagcctgggcctgtggggaagcctggctcagcactcaggaggaatcagcaggccggggttcgcatcccagcactctgctccatctgccctgtgaccttgggggagggactccccctgcctgagcctgggtgtccccgtctgaagactgcagatcataattggacccacattggaggccagggtgagggcacggcaggcagtggcggacgcgtggttagagccctggccgtggtggttggaactgcccagctgtggggaggttgtctttctgcccctgtgaatggactgtgtgaccttcacatggcaccttccctctccaaggctcagtttctctgctggaacatggagtcattccctgggctactgcaggaattaagtgtaggcgagttacctgtttacacaggacttggtccatagcatgagctgctttgtagaaatggttcatgacccagcgtggtagctcacacctataatcccagaactttgggagacccaggcaggaggatggcttgagcctgggagctgaagactagcccggacaacatagcaagactccatctctacaaaaaaatttaaaaatcagctgtgtgtggtggtgcactcctgtggtcccagctactcaggagcctgagatgggaggatttgcttgaacccaggcagttgaggctccagtgagccttgattacaccactgcacttcagcctgggtaacagagcaaggccctgtctcaaaaaaaaaaaaaaggttcaggtgtgagaggcagtgtggtattgtg[132 bp omitted]tgaaaccccctctttactaaaaatacaaaaattagacggttgtggtggcgggcgtctgtaatcccagccactcgggaggctgaggcaggagaattgcttgaacccaggaggtggaggttgcagtgagttgagatcgtgccattgcactccagcctgggcaacaagagtgaaactctgccaaaaaaaaaaaaaaaaaaaaaaaatactggtggaaactgtttgggttcagatcgtgggtccgggtctcactttccccacctgtaaaatggagataatagtgtggtaatggcctcatattgcatcaatgaccagcattaattaaacgttagttgtcgttgctatcaagtggcccggcagtgtctttctcagagacttgggcccccagcccatcagcctcttggcctttcttcctcccctcctgttgtcctcctgcttcccactcccagccggaagggcacaggcagaactgccttggcgggaggcctcaggcaccctgagccccagccctgaaagggagacagtccctggggcttccaatcaggccagggcagctcagagcaggcaggtgacctgcgggggagagaggccagggagggacaggacagtaggaacagaacatcaggaggagagaagccatggtgtgggagacagcaagtcagggcgcttctcaagccctgggtgtttcagggggtggcagaagcaacagtgtttcccatggaaggaggataacagggattcaaccaggtctcagggccagtgaaagacttggttaccctgcagggggtggtggctcaggcctgtaatgccagcactttgggaggccgaggtgggtggatcacctgaggtcaggagttcaagaccaacctggccaacatgatgaaacctcgtctctactaaaaatacaaaattaaccaggtgtggtggcacatgcctgtaatcccagctactcgggaaagctgaggcaggagaatcgcttgaacccaggaggcagaggttgcagtgagccagactgggccactgcactccagcttgggcaacaagagtgaaactctgtgtcaaaaagaaaaaaaataagacttggttacaatgtttggagtccaatctggggtaacagtgattggaatcaaatgttaggggcattccactgggaatcaaatgttgacatttgggtttgaagtagaatttgggggctggagaggggacagttgatgggtaaaatagcaagtcaggaccagtggtggtggaggaggagcctcgagtccagattgaggtcagcgttgattggggttgagggcagcctcatttagggcaaaatattgtagagttgatccaggctccaggacaggcatatcctgctttttcgcactttgccttattgagcttcacagatacagtgttttctacaaattgaaggtttctgacgaccctgtgttgagcaagcctgtaggctccatttttccaacagcctgtgcacaatttgtgtctctgtcacattttggtaattcacacagtatttcaaactttttcatcattattataatagctgttatggtgatctgatatcagtgatgtttttcctcttttttttttagagacagggtcttgctctgttgcccaggctggagtgcagtggcatgatcatagctcactgcagccttaacctcctggggctcaagcgatcttcccatctcagccccctgagtagctgggactataggcatatgccaccatgcctagctaattttttttttttaagtttttctagagatgggtgtctcgcttcattgcccaggctggtctcaaactccctggcttcaagcgatcctcccgccttgtcaatgattttgttttattgtgattcactgaaggttcagatgattgttagcatcttttaacaagaaagtattataaaattaaagtatgtacattgtttttatagctgtaatgctattattgcacactcagtagactgcagtatgatgtaaacacaatttttctttctcttttttttttttttttttgagatggagtcccactctgtcacccagactgtagtgcagtggcgcgatctcagctcactgcaacctctgcctccctggttcaagtgattctcctgcctcagcctcctgagtagctgggattacaggtgcgcgtcaccatgtccggctaatttttgtatttttagtagagacggggtttccccg[194 bp omitted]tcctgggttcatgccattctcctgcctcagcctcccaagtagctgggactacaggcgcatactgccacgcctggctaattttttgtatttttagtagagatggggtttcaccttgttagccaggatggtctcaatctcctgacctcgtgatctgcccgcctcggcctcccaaagtgctggaattacaggtgtgagccaccatgcctggccttttttttttttttttagaccaagtctcactctatcactctggctagagtgcagtagagcgatctcggctcactacaacctctgcctcccaggttcaagtgattctcctgcctcagcctccagagtagctgggattacaggcgtgtgccaatgcctggctaatttttgtatttttttagtagagatggggttttcaccatattggccaggctggtctcgaactcctgacctcatgatccacccacctcagcctcccaaagtgctgggattacaggcctgagccactgcacctggccacctggcccataatttttatatgcactgggaatccaaaagattcatgtgcattgcttttttgcagtatttgctttattgcggtggtctggaaccaaacttgcgatatctctgaggtatgtgtgtaattagaaaaggaggttggggctggatgcggtggctcacatctgtaatccgtacagccgaggcaggtggatcacctgagtcaggggtttgagaccagcttagtcaacatggtgaaaccccgtctctactaaaaatacagaaattagccaggcatgatggtgcacgcctgtaatcccagctgctcgggaggctgaggcaggaaaatggcttgaacccgggaggcagaggttgcagtgagctgagatcgtgccactgcactccagcctgggtgacagaggaagactccatccgaaggaaaaaaaaaaagacaaggaggttgggggtagtcagactgcagtgagggttgaagaaggggtgtgatgcctggggccctgaatgttgcagatttggaggacatgggggcttttgttcctggaggcgtctttttgtagagaaagatgaaggatgcttggctctctggggcctgagtttgaaaagggccacggaggggccggtagccaggcctcaagttaagtgcactagcccacgggttccacggaaggtgggattggatagctcatgctccatctcccccgcccagcatggcaccttgggcagtggccgctcctcggacaaaggcccgtcctggtccagccgctcactgggtgcccgttgccggaactccatcgcctcctgtcccgaggagcagccccacgtgggcaactaccgcctgctgaggaccattgggaagggcaactttgccaaagtcaagctggctcggcacatcctcactggtcgggaggtgagtatgggcacagggtggggctcggggcaggtccctgtgggaccaggtcttcggtgtatgttgatagaggtcaggattggccctgggtttgctttgtggcctcaggtaagttcccgactctctatgggacaggtcacaatatctctgatgttcccagaaccacccccatgggaaaagagaactaatttcatgtatccctgaaattgccgggaaatctcagatcacaggcagtccaatgtgtgcgttgctaaggatgcatgtggcttttgtagataaacctgagctgtggccggatgcattggctcacacgtgtaatcccagcactttgaaaggccaaggcaggaggattccttgagctcaggagtttgagaccagcctgggcaacatagcaacactttgtctccactaaaaaataagtaaaattttttaaaaattagctgggtgcggtggtgtgtgcctgtggtcccagctacttgggaggctgaggcgggaggatcgcttgagctcaggagtttgaggctgcggtgaggtgtgacctcaccactgcactccagcctgggtaacagagtgagaccctatctcaaaaaataaaaataaaataaaataaaagagggctgggcatggtggcttacgcctgtaatcccagtactttgggaagctgaggcaggtggattgcttgaggtcaggagttcgagaccagcctgaccaacatgatgaaaccctgtctctattaaaaatacaaaaattagctgggcgtggtggcacatgcctataatctcagctgctcagtaggctgagccaggagaatcgcttgaacccaggaggcggaggtttcagtgagccgagatcatgccactgcactccagcctgggtgacagagtgagactctgtctcaaaaaaataaaaaaattaaaaggccgtgcgcggtggctcactcctatagtcccagcactttgggaggccaaggcaagtggatcacctgaggtcaggagttcaagaccagcctggccaacatggtaaaaccccgtctctactaaaaatataaagattagcttggtgtgatagcaggcacctgtaatttcagctacttgggaggctgaggcaggagaattgcttgagcccaggaggcagaggttgcaatgagccaagatggtgccactgtattccgcctgggcaacaagaccgagactttgtctcaaaaaaaaaaaaaaaaaattggccgagtgcagtggctcataccaacaaacacagcgctttgggaggccgaggcaggtggatcacctgaggtcaggagttcgagaccagcctggccaacatggcaaaaccccatctttactgaaaaaaaaatacaaaaattagctgggtgtggtggtgcgtgcctgtaagcccagctacctggaaggctgaggcaggagaatcactggaacccaggaggcgaaggccgcagtgagccgagattgtgccactgcactccagcctgggtgacagagcaagaccatctcaaaaaataaataaataaataaataaatagtaaataaattaaaaataaaaaataaataaacctgagctgcctctctgttttaagggtggactttggttccttgaaatcttcctgtgatctggagaacacagcaggtttatttatgttgtattctcagttacacacagcctcactctccccaccacctcttccagagcaggcatctgtgctgagtatggtgacattattgcaaaaagggcccacacaggctttgcagcctagatatgaggtctctaactcacttagaggaaaaggaatggtgggtgatttcatgatttccccacccctccttcaacttcagagaaatgattggaatgaattatcctgccttggatggactctcccctgccctcacgctgtctacaccatacacgcaaaagacaccgggccccgatggtcttacaggcaaatcctaccagatgttcacattttatgccagttcttccagagactaaagaaagaactgccactgcctgactgatttttacgcgctagtttgtccttaagagcaaaaccagacaagaaacaaaattacaggccaatctggtgaacataggtataaaaatcttatacaaaatattaacaaacagaacctggcaaatcaattaaagaaagctgtgtgatgacgaaactggctttatctcaggaatgcaaagttcttttccctttgacaatttattcatgtacttcaccacattctcagattaaagaagagaaaccatatgatcgtctcaatactggcataaaaagtgtttgataaaatttttaaaaacacattcgtgagaatatgaggaaagctaaggggctctctcttccatgaagaacacatggttccctatatgtggatctggttccaggggtttctgagagggacctggccccatctctgttttaaaaataaaataaaagttttactgcagactgggtgcggtggctcatgcctgtaatcccagcaccttgggaggctcaggcaggcggatcacctgatgttgggcgttcaagaccagcttggccaacatggagaaaccccgtctctactaaaaatacaaaattagccaggcatggtgacgcatgcctgtaatcccagatattcgggaggctgaggcaggagaatcccttgaacctgagaggtggaggtcgcggtgagccaagattgcgccattgcactccagcctgagcaacaagagggaaactctgtctcaaaaaaaaaaaaagtttcactgcaaaagaagtataaggagagttcaatgacattctgatttcctccccatgatgtatctcaaagctgttttaaaagttgtgtttaagaggtagattccatcaggctgcataagttcaaatctgggccacaacttactacaatttactagccatgtaactttggccaaatgactaaacagctctgtgcctcagtttccctgttggtaaaatgatgataatcctgttagccaaatgttggtggcatgtgcctgtggtcccagctacttgggaggctgaggtgggaggatcacttgagcccaggaggtcaaggttgcagtgagctatgatcacaccactgtaacaccactgtactctagcctgggagacacagcgagactctgcctccaaaagaaaagggggcgggggggtggggtgggtgcggagaatgggagggataatcctagcacttatctcacaggttgttgtgaagattaagagttctcgtttgtaaagcgcatagtccttgtagtgagggcttagtgcatgttaaccagttgttatttattccactgttcatttgttcaaaacaaagatgtgatgggccagtgatcttcattgccctcacaaagggatcccctcaaggtctcgtccatgcccacatccactcaggcagctctggagcagcgtcagccaggccctgctgtggaataaggatatttctctgcagaagtgagggtggcagtggagacagtgaggacagcttgtgcaaaggccctgaggccctgagttccccatccacagggtatggcccagagtgagggctcttctgggagagggggcaaaggaaggatatcccagggtgatctgagctgggccagctggagtgcagtgacgtcatcttggctcactgcaacctctgcctcccaggctcaagcgattcttccaactcagcctccagagtagctgggattacaggtgcctgctaccacacctggctaatttttgtatttttagtaaagacagggtttcgtcgtgttgaccaggctggtctcgaactcctggcctcaagtgatcctcccgccttggtcttcccaaaatgctgggattacaggcctgagccaccatatccagtggggcttgtggcaccttgaccgtccctcctcctttcctccccctctaggttgccatcaagattatcgacaaaacccagctgaatcccagcagcctgcagaaggtgaggctggggagacgggggagagcaggagccaggcttccggcacagccgggtgacccacctgacccttcctgcgggggcccggctggggaaaggatcccccaagccacccaccctcactctcctctgtcttcctttctggccacgcccagctgttccgagaagtccgcatcatgaagggcctaaaccaccccaacatcggtgaggagggaatgggagcaggggcaggccaccaactggaacacttgcaaaggagttgggggtggtggcagtggttagaatagttggagacccaccaggcgcagtggctcactcctgtaatcccagcacttagggaggccgaggcgggtggatcacttgaggtcaggagttcgacaccagtctgaccaacatggtgaaactctgtctctactgaaaatacaaaaattagcagggcatggtggcgggcgcctgtaatcccagctactcgggaggctgaggcaggagaattgcttgagcccaggagccagaggttgcagtgagctgagatcgcaccactgcaccccagcctgggcaataaagcgagacttcatctcaaaaaaaaaaaaaaaagaaaaagttagagacctggtttctcatagttgcatcactgctgtgtgaccttgggcaagtcacttaacctctttgagcctctattttctcttctggagtaggggtgataagagggcctattaccaggtcattgtgaggattgacaaagatgatgcatccaaaatgcttagtttgggctgagctatgggacttggtccagttatttccaccagcatcaacatcctcactgtcattatcattgggcagaggcgggagtgaggggtctttagtgagagaagcggagtttagctccgcctggatgtggctgcagcatttgttcattcattcattcatttactcagtaattattgattgagtggccgctatgtgccagaccctggggacacaacagggaagacaacaagacacaaatctctggcctcatggagctgaca[139 bp omitted]gtatctattaaaaatacaaaattagccggatatggtggcgcatgcttgtaatcccagctactcgggaggctgaggcaggagaatcgcttgaacctgggagggtgagcagagatcgcgccattgcactccagcctgggcaacaagagcaaaactccatctcaaaaaaaaaaaacgaaagtggaaagggtggtagagggggctgaggagtttggaaaatcttgctgtcagtagggagccattgagtgttgagttggggtgggggtgttatggttggcacatttgcatagttactgaggacaggttaggaggggccctttctccctaatgccctacactgttcccaaccattatagtgaagctctttgaggtgattgagactgagaagacgctgtacctggtgatggagtacgcaagtgctggtgagccgcccaccctctccgccctgcccctgtgccacctccccctgccgctgcacctgaccctgaccccgctcggcctctgccctgcaggagaagtgtttgactacctcgtgtcgcatggccgcatgaaggagaaggaagctcgagccaagttccgacaggttggggcagggctgagggtggggctgactgggtgcctgggtccctgggagggcgtctgagagctgggcatggtctgggctgtccagcgacctgggggcggggcttaagtctgggcaggggtgaaggtgcagagctgggtgtgctgggcatatagttgcccagatgtgagggcatccggatgtaggtttgcaggtgccccgttgggtgggtgagaggatgtttgggcatgaaggcgccccggtgggcaggtgttgcatgtgtagggcatgtgggtgtgcccagcgcgtaggtgtgtgggtgatgggggcacgaaggtgccagggtgccaggtgtgagtgtgccggagtgtgattcaaaagatgtgtgggcagtagctatgtgggtgcccaggtatgtaggtatgtaggtgtgtggggaagagagtgtagggcaccccaggtagatgggcaagagagggctgaggggtggttgtgtaagcttgtaggtactagggcatgccggtatgtgggtgcccgggtgtgcgagtgcccagatgtatgggtttccaggtgtgtggtagtgaggacacccaggtgtgtaagagtgtggggggggccaggtgtggagtaagaggacgtgcaggtgtgagggtgcccaggtatgtgggataagaagaagtgcaggtataagggtgcccaggtgtggggtaagaatatgtgcaggtgtgagggtgcccaggtgtggggtaagaggagatgcaggtatgaaggtgcccaggtgtggggtaagaggagttgtgggtgtgagggtgctggggcatgaggggtaagaagatgtgcgtgtgtgagggtgccaggtgtgtggggtaagaggagatgcaggtgtgagggtgccggggcatgtggggtaagcagatgtgcaggtgtgagggtgccgggcatgtcggctaggaagatgtgcaggtgtgagggtgtttctgccttgacgctgctgtcctgaactcaagggccataagccctggtgagttggggcggcctgtctatctacaggtatgggatatccccatgggagtttccagatgtgaaggtcaagagaggctggtccccatgccttggttccgacatccctgggcatgggggtgtcctgggggagacgtgtgtctgcccaggttccacgggcacctcttgctgtgactgaatcagggtgtgaggccccagatctcaggctgtgccttggggaggcctggggcccagctgtgagtggtttcacagtccactgagggaggctgagggttttgggagccacaaataaccaaccttccccttccctcccagattgtttcggctgtgcactattgtcaccagaaaaatattgtacacagggacctgaaggtaagcccccgacccgctgtgatctcagggaccacggctcagcccacagacttctccctgcccccacccctccatggtttccgtggcctccagcaaattcctccagcccttttctcctcctgctcttccctccacacccagcacccccttgaccctttcccaagcttttgtggcagaaacaaggccagcagatgggggagcggatgggggggaggggacaggaggagtgaacaaagcagggagaaacaaagtgtcccaaaatggccctggatgctacagggctgttggataaggacgctgggacatgataaggggtttgtcgctctcagagcctttgggaccttggcattctccgaccttaggacattcaggactccttgaggatttaggttgcagagc[133 bp omitted]gctccgcctcctgggttcacaccattctcctgcctcagcctcccaagtagctgggactacaggcgcccgccaccaagcccggctaattttttatatttttagtagagacggggtttcaccgtgttagccaggatggtctcgatctcctgaccttgtgatccgcccgcctcagcctcccaaagtgctgggattacaggcatgagccacggcacctggccgggaatctgagaacttaagaaggcttcgtttttatttttatttttgacatggagtttcacactgttgcccaggctggagtgtagtggccccatctcagctcgctgcaacctccgcctcccgggttcaggcgattctcctgcctcagcctcccgagtagctgaggtcacaggcacctgtcaccatgcccagctatttttgtatttttagtagagacggagtttcaccatgttggccaggcttggtcttgaactcatgacctcaggtgatccacctgcctcggtctcctagagtgctgggattacagatgtgagccaccgtgtccagtctgagaaggggctttgagagaaaagccaccttggccagtaccaggcaggaagggactcaacggggctccagcccagctacctgtaggagctgagccaggcagcctcctcgagtacctgtggccccagggtccgcattccacaccttccgctgtatgtctcagtcctcgcgctccaagaccaggtggctgaccgtttggttggctcaaatccggttgtcttgactgtcgttttgtgagcacctgtgtgctaggcggcatcctaagtgctttaaggaagtgcttctggaactatctgtgaggaaggactgggttggttttgttgttttgttttgtttttttgttgcccatactgaagtgtgatgtttccatcacagctcactgtagcctcaacctcttgggctcaaatagttctctcacctcagcctcctgggtagctggaaccacaggtgtgagccacaaagcctggctaatttttgagttttttgtagacaagggatctcactctgttgtccaggctggtctcgaactcctgggctcaagagattctcctgcctc[135 bp omitted]ggcctcccaaagtgctgggattacaggtgtgagccactgtgcccagccacaaaccccattttaaaagctattattagattctaaagaaattccacagtcaaattcctatggaggaccaggcgcagtctcacacctataatcccagcactttgggaggctgtggtgggaggattgcttgagcccagaagttcgagaacagcctgggcaacacacccaagacctgatctctacaaaaaataattgtaaaaaattagcttggctggacgcggtggctctcacctgtcccagcactttgggaggcctaggcaggcagatcactggaggccaggagttcaagaccaacctgggcaacacggtgaaactccatctctactaaaaatacaaaaattaggtggtcgttgtggcgcgtgcctataattccagctgcttgagaggctgagacatgagaattgcttgaacctgggaggtggaggttgcagtgtgccaagatcgcgccagtgcactccagcctggacaacagagcaagactccatctcaaaaaaaaaaaaaagaaaaaaaattagcttgtatgcctgtggtctcagctactcaggaggctgaggcaggaggatcccttgagcccaggaggttgaggctgcagtgagccatgatcatgccactgcattccaacctgggtaacagagcaaaaccctgtctctaaaaacaacaacaaaaaatacaaaagcagaaagtgcatctgaaaaaaagaaaaataatacaaaatgaaaacaaaaaacaaattgctatagaggttcaagtgctaaccctctcttcacttccttccactgggctagggtgtccctccacacggccctggaggcagcaccttagaggcttccatgattcacctggaggtcgtatgtcccctggtggagggtccccaaagcagctaacacgagttttggggtcgtattagtacaccaggggtaccaaccaaggggaccaacccatgtgactttggggctggattgcggagcctcaaatggcaggaaaagaaatgtaatccctggcctggcgtgacggctcacacctgtaatctcagcactttttgggaggccgaggtgggcggatcacctgaggtcaggagttcgagaccagcctggccaacatggcaagacctcgtctctactaaaaataaaaaaaatagccaggtgtggttgtgggcgcctgtagtcccaggtactcgggaggctgaggctggagaatcgcttgaacccaggaggaagaggttacagtgagccgagatcgtgccactgcactccaacctgggtgacagagtgagactccatctcaaaaataaaaaataagaaaaagtaagccccgagcaagccagatgctattacattcaggtttagggaggagctctgtggtgtgtctttgtagggtttgggcctttattggggcaggagctggggaagagtggtccagaaataaaccaggagacatagggagacctgggaggaagccagggatgctggtgacctgggcgagggaaggaccgcagttgggatgggccagacgcgggtgacattttgaaaggtggaggtgtgcctctgtttgtagtcagaaggctggaggcttcttcctccgcgcactgtggaaacgggtggccttgtttagattctagttgtgctgctttcttgcaatgggcatgagttgtggcctcccacagcttctgtttcctcccctgtgaaatggcaattgcaagaccgcatgccgcaaaaaaatagacaaaactttataacaatacaaaacgtttatttatttatttattcacttatttttgagatggagtctcgctgtgttgcccaggctggagtacagtgatgcagtttcagctcacgcgattccttgcctcagcctcccaagttgctgggattacaggcacccgccaccacgcctggctaatttttgtattttcagtagagacagggttttaccatgttgcccaagctagtctcgaactcctgacctcaggagatctgcctgccttggcctcccaaagtgctgagattacaggcgtgagctaccgcgcccggccatgaaatgtttactgatcactgactgtgctctaggggccgctgtgagcactttacgcttaaacccacaaccacgcttgaggcaggtgtcgagatcaccctcagtttacatacaaggaaactgaggcacagagaggtctggtaacccacctaaagttcacacagcgagtgagtggtggagctgggatttgcagctggaattctccgagagtctgtcgtttcaccttcacgttatgcagacagacactgttataattgatagtccacagagcccagtgcatggtagatatgcaaccaggattaaattattgctttcgttttcctgggtcttgagcaatcaggccttattttgtttctgctgggtaacttgaggctccaagaggggcaggagattacctgaagacccctagatctgcagaccacatggggtaatagtgatattacatagtactcgctgggtatgaaatactgttctagcttttctttttttttgagacaagttctcactctgttgctcaggctggagtgcagtggcacagtctcagctcagtgcaacctctgcctcccaggttcaagcaatttttgtgcctcagcctcctgagtacctgggactactggcgcacaccaccatgcccggctaatttttatctttatgtttttttgagacggagtttcgctcttgttgcccaggctggagtgcaatggcatgatctcggctcaccgcaacctccacctcctgggttcaagcaattctcctgcctcagcctcccgagtagctgggattataggcatgtgccaccacgcccagctaattttgtatttttagtagagacggggtttctccatgttggtcaggctggtcttgaactcccaacctcaggtgatctgcccacctcggcttcccaaagttctgcgattacaggcgtgagccacggtgcccagcccaatttttgtatttttagtagagatggggattcaccatgttggccaggccgatcttgaactcctgacctcaggtgatccacctgccttggcctcccaaagtgctggtattataggcgtgagccactatgtctggcctgtgctaggttttctatgtggattaactcataattctcaaactacgctatgaaataggaactaagattatccccattctatggatgaggaaactgaggctcagtgaggtaaagttactacctaaggtcaggtagagagtaaaggacaggcccaagagttgatccctgtgggccagccctagagcctgtgctcctgtctgcctcccacgtccatgaaaggctttggccttgagtcccactttccgccctctccttctctccctgcaggctgagaacctcttgctggatgccgaggccaacatcaagattgctgactttggcttcagcaacgagttcacgctgggatcgaagctggacacgttctgcgggagccccccatatgccgccccggagctgtttcagggcaagaagtacgacgggccggaggtggacatctggagcctgggagtcatcctgtacaccctcgtcagcggctccctgcccttcgacgggcacaacctcaaggtaccgagaggggctgggtgcaggggcatcagcccctccccacagtcaggcccctatcccccccacacctcccctgcagagggcctcagtggtgggactggcctgagttctcatgggaagatgggggatgggcaggattcaagtcccctctgcagtgaggccagccgaatggactgtgccatgctggggttaagggcatgatctttgcagctgataggcttgagttcaaatcctgactcatccgttcactgagctaatatttatggcccacttctctgtgtcaggctctgttttgggctttgcatgtaaggcgagaacaagagaggcaaaaactcctgcttggccgggtgcggtggctcatgcctataatcccagcactttgggaggcggaggcgggaggctcacttgagcctgggagttcaagaccagcctgggcaacatagggagacgctgtctctacaaaaaatacaaaaattaaccgggcataatggcgcacgcctgtagtcccagctacttgggaggctgacgcgggaggatcacttgaacctgggagatcaagactgcagtgagctgagatcgtgccactgcactccaacctgggtgacagagggagaccctgtctccaaaaagaaattaaaaaacaaaccctgccctcgtatatgctacgctgtgggtgaaccttgaaaacattgtgctaagtgacagaagccagtcacataaggccacagaatgtatgattccattaatgtgaaatgtccagaataggcaaatccatagagacagaaagtggattactggttgcctgaggctgggggggaggagcaagttggaggttgattgctaaagggtactgaatttcttttgaggtgatgaaaaatgttctaaaattcaatgtagtggccggcctgatggctcacacctatattcccagcactttgggaggccgaggcaggcagatcacctgaggtcaggagttcgagaccagcctggccaacatggtgaaaccctgtctttactaaaaatacaaaaattaaccgggtgtggtggcaggcacctgtaatcccagctactggagaggctgaggca[149 bp omitted]ctaaaagccatcgaattgtgcacttcgcttcaaacaaaacagttcctgtcttcccagactaacattcctactggggccaggcagctaacaaaacaataagcaaactagatatgatatcagatgctggcctgtgctatgctggggggaatactgtaaggggatgggaggtgtgggctgagttgttgcttgctttttttttttccccctttgaactttttattttgaacgattgccaatctacggaaaagttgcaacagtagagcaaataacacatggtatgtttcaggagcttcacaatcgctggcctgtgtccacatttgctctatctgtctgtatttgcacatgatctttgctgccctcatcggcattgatggcgcatttgacagttagttgcagacgctgtgtccttttatccctaaaggcgagagcgggttatctcctgagaccaggggcgttttcctgttgacggtgacatacaggaaatacagcagtggtataatcctggcctctacgccatggcccatactcagatttcatccatcatcccaggaatatctttggcagctatttttttttcccagtcggggatccactcgggtccctgcgttgcatttagctgcgccatctcttgtgtctcctttcatccggaacagttctcagcctctcttttgtctttcatgacattgacattatcgattagttcaggccagttaattttgcagaacgtccctcaatttgggttgcctggtgtttcctctcgattggaatcgggggtgcattggggcaggaattctgcagctgggacgctctgtcctgctctgcgttgcccgtgaggagcacgtactgtgatatgaaattgtaaagtcagggaaatacttgcagaggacagaccatcaaagcggaaccctgagtgatgaagaggagggagtcccttcttcacagtggccttggccaaatagccaacccctctaagcctcagtctca[146 bp omitted]cccgtctcttctaaaaatacaaaaaattagccgggcgtggtggcaggcgcctgtagtcccagccactcgggtggctgaggcaggagaatggcatgaacctgggaggtggagcttggagtgagcggagatctcgccactgtactccagcctgggcaacagagcgagactccatctcaaaacaaacaaacaaaaaagatgataccaaccttgtggcagtgatttttaaggactggctgagatcagggatgcaaagtgctcattcaagacagccttctggccgggcacggtggctcaggcctgtaatctcagcactttgggaggctgaggtgggcagttcacctgaggtcaggagttcaagaccagcctggccaacatggtaaaaccccgtctctaccaaaaacacaaaaattagctgtgcctggtggcatgcgcctgtaatccctgctactcgggaggctgagacaggagaattgcttgaaccagggaggcagaggttgtagtgagccgagatcacaccactgcactccagcctggatgacagagcaagactctgtctcaaaaaaacaaaacaaaacaaacaaacaaaacaggctctgacactccggccatagctgaagtctggggtggggaggtgttgtcacagaataatttttctgagcctcaagcatgaagctaagagacctttttgaagggccaggccagtgtcttacctgccccaggtccttgtcactttctgccatcctggtgtccccaccaggcaccccaggccttgctgtgcaaaggaggcacacagctgagaagaggcaggttctagctctgtcatttcctttctgagtgaccttggacatgtccttttctgaacctcagtttccccacctgtaagatgaagacactaagagtattcaggacaggtgtcgtggctcatgcctgtaatcccagcaccttgggtggccg[134 bp omitted]gatccaggagaatcacttgaacctgggaggcagaggctccagtgagccgagattgcgcccctgcactccagcctggacgacagagcaagactccatctcaaaaaaataaaaagagtttgacaccagcctgggcaacatttcaagaccacatctctacaaaaaatattttttaaattagcctggcattgtggtgcatgcctgtagtcccagctacttgggatgctgaggtgggagaattgcttgagcccaggagttccaggctacagcgaactatgatcacgccactgcactccagcttcggtgacagaacaagagcctgtctctttaaaaaaaaaaaaagcatctgcttgcagcccgtctgcatatgttaagcccttcactggagcttggcatctggccacagcatcatgcttgggagctgcgctggaggtggcagtggtggcctgatggtttcttctcccccatcacgtgataggcagtgtggcatggtggtcacacagcacaggctccagagccaaggctctgccactttctggctgtgcaatcctggggcaagtgaccaaacccctccaggcctcaacctcctcgtctggaaagtgggcgttataaccgggcttcgcggcgttgtgaaaatggatgtaatatgcataaagcacttagaacactgcctgctaaggggtaagtgtcctgaaagtgatccaaattaaatattaatagccctttatgatctgcagaggctccccaggcatgggcatctttcagcccttttaggagaatgctgcagcagaggactctgtcctaaaggagtcctgttcacccccaacgctcaattcattcctacctgttttctgcctcccttcgttttttttgttgtctgtttgttttttgagacaaggtctcagtcacccaggctggagggcagtggtgcagtcacagctcactgcagcctcaacctcccgggctcaagcaatcctcctgcttcagcctcctgagtagctgggaccacaggcatgtgccaccacacctggctaatttttgtattttttgtagagacagagtctcgctgtgttgcccaggctggtctcaaactcacgggctcaagcggtcttcccaccttggcctcccgaagtgctgggattatagacataagccaccacgcctggcctattgcggttttttattcagatggaaagagctccccctggtctgccaagctatggatttatcttatttttcacagctttggtagggcctctcataaaaggcccttaaagagaaagccagcagataaatccatgaatggccttgaggagtgtgtctctttggacagcaggcatggctgggggaggggagagacgagaaggcaggagaggcagtagggtctccttccccttgagtgaatctcatatttacataccgctctctggctctgggccaggcatgtggtaagcattttacagatttttttttttttttttttttgagatggagtcttgctctgccgcccaggctggagtgcagtggcgcagtctcggctcactgcaacctccgcctcctgggttcaagtgattctcctgcctcagcctcccgcgtagctgggattacaggggtctgctaccacacccagctaatttttgtattttttttttttttagtagagatggggtttcgccatgttggcctggctggtttcgatctcctgacctcaggcgatctgcctgcctcaccctcccaaagtgctggaattacaggcgtgagccaccgcgcccagccacatttttacggatattaactcacctgtaccctggtagcaagcatgtgaagtgggtcctgtaatccctttcacggataaggagaccgaggccccagtggctgactcacttacctacctccctcttacctgacttagagaataaacttccttttttttctgagacagaatctcgccctgtcacccaggctggagtgcagtggcgtgatctcaactcactgcaacctccacctcctaagagtttaagtgattctcgtgcctcagcctcccaagtagctaggactacaggcagccaccaccacacccagctaatttttgtatttttagtggagatggggtttcaccatgttagccaggctggtctcgaactcctgacctcaggcgatctgcctgtctcggcctcccaaagtgctgggattacaggtgtgagccaccgtgcctggccagataataaactttctctgcaagttttcctctgaatgaaaagttatgtagcttaaatttttttttttttttttttgtagagacaggctggttgttcaggctggtcttgaactcctgggttcaagctatcctcctccctcggcctcccaacgtgtttggattacaggtgtgcaccaccatgctcaggtcattttttattttttgtagagatgaggtctccctgtgttgcccaggctgttcttgaactcctgggctcaagcgatcctccggtcttggcctctacgcctggccaagaatttttttttttaaattgcagcgtccatatgatgttcccattttatggacagggaactgaggtcaggagaaaggaatggggttttgcttacctcgtcaaggactgggactcagagcttctgtcacttctatcaaaggggttgggacaaaggttgtgtgtgtgtgtgtgtgtgtgtgtgtgtgtgtgtgtgtgtgtgtgtaataggtggggggcggggcagaccccctcctccagtaaccccatccctgcaggagctgcgggagcgagtactcagagggaagtaccgggtccctttctacatgtcaacagactgtgagagcatcctgcggagatttttggtgctgaacccagctaaacgctgtactctcgaggtgagcccagcctcacagccagcgggagcccttctagtctcctgactcccctaaactctgcctgcccccacccacaaaagccttcttgacacacttttcctctcctgtgcccaccgaagatctgctgctggtgagtgggggtagacaggccgtccagggaaaagctcccaggcctgtcctgacgccacccccccgacaggctcacccactccctgccttgccagtaattagctaatgagctcctaggatgattacagggtgccagggacccagatgatgcggaggagggagggtggcatcaggaggctccggcaggggacgtgggggagagagaggcccaggaggcgctatctcttaggaagcccgcaattctgggtgttaggcctcggaggtttggggcagggcagaagctgtatgatttctggttccttctgacacctgtcttcccccttccctgctcctgatgcctgcagcaaatcatgaaagacaaatggatcaacatcggctatgagggtgaggagttgaagccatacacagagcccgaggaggacttcggggacaccaagagaattggtgagggtcagggagagccatcctgtcacccaggatggagtgcagtggtgcaatctcggctcactgcaacctccgcctcccagaatcaagagattcttgtgcctcagcctcccaagtagctgggaccacaggcgcctgccgccatgcccggctaatttttgttatttttagtagagacagggttttgccatgttggccatgctggtctcaaactcctgacctcaggtgatctgcctgcctcagcttcccaaattgccaggatcacaggtgtgagccactgtacccggcccatgttcgctttgatattaagacataaagagagaccaggcgaggtggttcatgctggtaatcccagcactttgggaggtcgaggtagaagaatcacttgagcccaggagttggagaccagcctggccaacatagggagaccctgtctgtacaaaaaaataaaaataaaaaattagccagttgtggttgtgtgcacctgtagtctcagctactcagcaagctgaggtaggaggatcccttgagcccaacaatttgaggctacagtgagctatgatcatgccactgcactccaggcgacagggtgagaccgtgtctcaaaaaaagaaaaaaaggtcaggcacagtggctcacgcctataatctgagcactttgggaggctgaggctgacagatcacctgaggtcaggagttcgagaccagcctggccaacatgatgaaacctcgtctctactaagaatacaaaaattagatgagtgtggtggcaggcacccgtaatcccagctcctctggaggctgaggcacgagaattgcttgaatccaggaggcagaggttgcagtgagctgagattgcaccactgtactccaccctgggcgacaagcaaaattccatctaaaataacaataattacggtttttaccattaaatggcaaaaaccggaattacttttgtatcaacctaattatattagtaggttgaacacaacaaaaagttgaaccatatgaaattgccatttttttggtttaaaattgtcagtaccaccaattttgtatggtttaacctaatagtgatgatttattctgccacataactaaaatgaatagagtatgcagccttcaggcacagttgtatccaggtgctcagagacagttgttgggaatgttttctgtggtagctttttcccaggctgctctccaggaggcaagcagatctgggtcacatgccttcaatgaagcagtcagtgtggctttgggtgtagaacacactaattagccagacctgggttatccgcctgccttagggttggagcaggggagccatccacgtgatctgagcggaaagaatgttctttcaaaggaaatcaatgtgctgttgggaagggaggatgggtactggacaggtcaaagagcagacaccagtgaatgacacagaaatgagtggaagtgggccaggtgcagtggcttatgcctgtaatcccagcactttgggaggcccaggtgggtggattgcttgtgcccaggagtttcaaaccagcctggacaacatagcaaaaccctgtctctactgaaaatacaaaaactgaggtgggaggatcagcagagcctggggaggccgaggctgcagtgagctgtgaccgtgccactgcactccagcctgggtgacagagtgacaccctgtctcaaaaaaaaagagaaatggatggaagttaaagtttctgggagtctgaaacttctctccatccccccctcccagaggtgatggtgggtatgggctacacacgggaagaaatcaaagagtccttgaccagccagaagtacaacgaagtgaccgccacctacctcctgctgggcaggaagactgaggtcagggggcgccaggggcccttggggacgcgtgatgcctgggtggagggacttggggtgcagaagagcctcatctgtcatcctctcgcaggagggtggggaccggggcgccccagggctggccctggcacgggtgcgggcgcccagcgacaccaccaacggaacaagttccagcaaaggcaccagccacagcaaagggcagcggagttcctcttccacctaccaccgccagcgcaggcatagcgatttctgtgagtatcaaccccacgccctcacgcaccctccttctccccaaggcccagacttacagttacgtcagggttctctgattggcaagcaacagaaacccactggagctaacctcagagagggaggaatgtcttataaagacacagggcattgcatggaacttggaggcaggaatgcacagccaggctcaggaagggattaaaaccggaaaagcagccagacccagagcagacactctctgtcttgcttcctctctgcttgtgtggtttttcctttgtctctcacttatctcatcctatcttttttcctgatgtcccagctccccgatttttttttttgagatggagtctcactctgtgcctcaggctgtagtgcagtggtgtgatcttggctgatggcaacctctgctgcacaggttcaagcgattcttctgccttaggctcccgagtagctgggattacaggcgcctgccataaccccccggctaatttttgtattttcagtagagatggggtttcaccatgttggccaagctggtcttgaactcctgacctcgtgatccaccctcggcctcccaaagtgctggcattacaggtgtgagccactgtgcccagccttttcttttcttttctttctttttttttttgagacagagtctcactctgtatcccaggctggagtgcagtgtcgtgatcttggctcactgcaacctccacctcttgggttcaagcgattcttgtgcctcagcctcctgagtagccgggattacaggcacctgccaccacacctggctaatttttgtatttttagtagagacagggtttcaccatgttggccaggctgctcttatactcctgacctcatgatccacccacctcagcctcccaaggtactgggattacaggtgtgagccactgcacccagcccccaatttcttaccttagagaccagtccaaatggcagctggaatctctggtccaggatgaagctctgatatcagagtcaagtttgaattaatccattgtaactggggcacaggaggacacgttgtacaaagtggctgctgagagtctgccctctggctttgcctccacactgaagtaaaggaggctctggaagagagctgggcggacagctgattataccccacattctgcaactgacagacatctcatctgctgcagaaaatgaatacagagtctgagtttaaatctgggccaggcacggtggctcatgtctgtaatcccttgggaggccgaggtgagtggatcacctgaggttgggagtttgagaccggcctggccaacatggtgaaaccctgtctctactaaaaacacaaaattagctgggcgtgttggtgcgtgcctataatcccagctactcgggaggctgaagcaggagaattgcttgaaactgggaggcggaggttgcagtgagccgagatcatgccattgcacaccagcctgggcaacagagagacctcatctcaaaaaaattaaaaaaaaaaaaaaaaggatacacaccaccatcagcacccattaggcatggagacttctgagaggtcccttcacccacacactcatcaaattttaaccctctcttctattttttttaacggctttattaaggttaaaatt[137 bp omitted]acatagcaagaccccgtctctacaaaaaaattaaaaattggccaggcacagcggctcacgcctgtaatcccagcactttaggaagccgaggtgggaggatcacgaggtcaggagttcaagaccagcctggccaagatggtgaaaccctgtctctactaaaaatacaaaaaaagccaggcatggtggcgggcacctgtaatcccagctactcgggaggctgaggcagagaattgcttgaacctgggaggtggaggttgcagtgagccgagatcacgccactgcactccagcctgggccacagagcgagactccgccaccccgccccctaaaaaattaaaaattaggtgtggtagtacacgcctgtggtcccagctacttgggaggctgaggtaggaagaccacttgaacccaggagatcgaggtcgtggtgagccgtgatcgcgccactgtactccagcctgggttacagagcgagacctcatctcaaaaaataaattaaaaagtgcacaattcagtggctttaatatatttatagagttgtacatctatcatgatgaccgatttcagaacattttcattaccccaaaaagaaaattcacaacttttagcaatcaacttccaggcagggcatggtggctcatgcccgtaatcctagcactttgggagactgaggcaggcagatcacctgagcgcaggagttcgagaccactgggcaacatggcgaaaccccatctccactataaaatacaaaaattagccgggcgtagtggcaggcgtctgtaatcccagctactcaggagtctgaggcaggagaattgcttgaacctgggaggcggaggttgcagtaagctgagatcgcgccactacactctagcctgggcgataagagtgagacttcctctcaaaaaaaaaaaaaaaaaaaaaaaaaaatcaacttccaatcccccttccaccctcagctactaatctactttctatgtcgatgaatttggctattctagacatttcaggtaaatggaattacacgatgtgtggccttcagtgactggcttctttcatttagcagaaagttttcaaggttcatccatgatatgggtatcagcacttcattccttttcattggcaagtaatattccattgcatagatagaccacattttgtttatccattcatgaacacgtggattgcctccactttttggctgttgtgaatgatgctgctgtgaacatttgtatccgtgtttttgtgtggctgtgttttgccgtcatttctcttgggtacgtatctgggagtggaattgctgagtcatctggtaactgtgtgtttaataatagtttgaggaactttcagggtgttttccaactctgttcgttttacagccctgcttgtctgcaggggtgaagttcttactctgggacaggtactaggctgtctgcttgtctaatcttttttttctctgtcttacatatctcaccttatctttttctagatctctcagctcctagatttcttcttttttttctttttttgagacagagtctcactctgtcgcccaggctggagtacagtggtgcgatggtggctcactgaaacctcagtctcccaggttcaactgattctcctgcctcaggcccccgagctggaattacaagccaccttgcccagctaattttgtatttttagtaga[138 bp omitted]ttttttttggaggcaaagtctcgctccgttgcccaagctggagtgcagtggcgcaatcttggctcactgcaagctccacctcccgggttcatgccattctcctgcctcagcctcccgagtagctgggactataggtgtccaccaccacgcccagctaattttttgtatttttagtagagatggggtttcactgtgttagccaggatggtcttgatcgcctgacctcatgatccacctgctttggctttggcttcccaaagtgctgggattacaggcatgagccaccgcgcctggcccgctcctagatttcttacatctcagttttagaatccagcccagggctgagtgcagtggcttacgcctgtaatcccagcactttgggaggctgaattgggtggatcacttgagctctcaagttcgacaccagcctgggcaacatgatgaaacctcatctctacagaaaaatacaaaaattaggctgggcgcagtggctcttgccttgtaatcccagcactttgggaggccgagctgggtggatcacctgaggtcagcagtttgagagcagcctggccaacatggtgaaaccctgtctctactaaaaatatcaaaattagccgggtgtggtggtgagcacctgtaatctcagctacttgggaggctgaggcaggagaattgctggaacccgggaggcagaggttgcagtgagccgagattgtgccattgcacttcagcctgggcggcaacagcaagactctgtctcaaaaacaaaacaaaacaattagctgggcatggtggtgtgcacctgtaatcccagctacttgagaggctgaggtgggaggatggtttgagcctgggaggccgaggttgcaatgagtccagatcgtgccactgcactccagcctgggcgatagagccagactgccgtgtctcaaaaaaaaaaaaaaaaaaaaaaaagaatccagcccaagtgttagctagaatctccttggtccactcatcaggatcaggatggagctctgatatcgagtccagttgggattaatctgctgtaatgggggcacaggaggacacattgcacaaagtggctgctgaaagcctgcgctctgacctcccctccacactgaagtgagggaggagagaggtgtcagggaatctgagacccagcatgagccccacacgggaagtggtgcttctgccctacccccaccattgctggaggtcaaaccattccctgcccctgcgtcttgtctttcccacctgtaaaatgacagggcgtgcccagaaagttcctaaggagcttgtgactttggtatcatatggttagaacgtggtaaccttcagaactccccacactgagacctgagttccagggattctcagagagggattgctggcaggtgccaggtatctgtcattgtcattgtagagctctcagcttgtggttctgggacttctgagcatgtatcgctcctgaggatgtaacaagcagaccttctgaccctctcaagtttgagatcacttttcacccccgggttctaaaacagtagattcctaagatgttcctagagaccagaattattttgtgttgcttttgaaattgttcatacaataacatccttgaaaatgtgttagtttggaaaggatagacagtgaaaaagtcttcatccaacacatatccccagctcccagtttctcaaatgcagcaactgttacggttttttgttgttgtttttgttttgttttttgacggagtctcgcactgttgccagactggagtgcaatggtgtgatctctgctcactgcaacctctgcctcccaggttcaagcgattctcctgcctcagccttccaagtagctgggattacaggtgcatgccaccatgcccagctaatttttgtatttttagtagagacagggttttgcca[269 bp omitted]atggcgaaatcctgtctctacaaaaaaaaatacaaaaattaggtgggcatggtagtgtgtgcctgtagtcccagctacttgggaggctgaagtgggaggatggcttgagcctaggaggccaaggttgcagcaagctgaggtcacaccactgtacttcagcttgggcaacagagtgagatcctgtctcaataaaaaaattaaaaaaaagaaggaaacttaagatatataaaaacaataaattctccccttttgaaacaagttatagtcctttggagatattcatatataagcaagtagatatagatacacacttttttgcttttgtagacaaatgataacacattgttgacccatctcttgtcttgccttttctactttccagtccgtcatgaagatcattctgtactggtgcataaagtgcttccttattcttttttatagctgcataattttccactgtggaaataccttgacttatctagtcattcctctactaaggggcatttaggctgttcccagtctaatggtacaggccaggtggggtggcacacacctgtaattccagctacttgggaggctgaggcaggagaattgcttgaacccaggaggtggaggttgcagtgagcggagatcgcaccactgcactccagcctggcaacagaaccagactttgtctcaaaaaaaaaaaaaaaaaaaagaaggtgcaatgaatggcctgtatgtgcatgatgtcattgatttggagtttctaagtcagtatatgtgcgttggtaatcttgaggtaattttgacagatattgtcagaatggcccacacagagattgcaacccacgtgaggaattctcaggttccaacgatcccccagagtcagttctgggtttccgtggtgatgccagctctaaacggtaccccctcccccaggtggcccatcccctgcacccctgcaccccaaacgcagcccgacgagcacgggggaggcggagctgaaggaggagcggctgccaggccggaaggcgagctgcagcaccgcggggagtgggagtcgagggctgcccccctccagccccatggtcagcagcgcccacaaccccaacaaggcagagatcccagagcggcggaaggacagcacgagcacccccgtgagtgaccagggctggggggcagggctgggggcgccacctgggccacattcctcaggccctgccttcatctcattccccagacggaactccttcttaccaactccttcttctacccattcattcattcaacaaacatttatcgagtgcctctgtttgcctgagctcagtttatacactaacatttgatgttagcgtataaattagtgttctgtgtcaaagaagtgcagaacgtactcttggcagaaaggatttaatacaggaaattaagtgcttttaaaaatgtgggaaaggccaggcacagtggctcatgcttgtaatcctggcattttgggaggccgaggcgggaggatcacttgaggccaggagttcaagaagcatagcagacgccatctcaactaaaaatcaaaaaaattagccaggcatcatgttatgtacctgtggtcccagctactcgaaagaccgaggtgggagaatcacttgagcccaggaggttgaggctacagggagctgtgttcccgccactgcactccattctgggtgacagagcaaaaccctgtctcaataaatcaataaataaaatattaatagtaatttaaaaaatcaggccaggcacagtggcttacgcttgtaatcccagcactttgggaggcagaggtgggcggatcacttgaggtcaggaatttgagacctgcctggccaatatggtgaaaccccgtctctactaaaaatataaaaatcagctgggcgtggtggcgggcacctataatcccaactacttgggaggctgaggcaggagaatcgcttgaacccaggaggcggaagctacagtgagctaagattgcgctactgcactccaggataggtgacagagtgagactccatttcaaaaaaaaaaaaaaaaagccaggtgcaatggctcatgcctgtaatcccagcactttgggaggccaaggcgggcagatcatgaggtcaggagatcgagaccgtcgtggctaacacagtgaaacctcaattctactaaaaatacaaaaaattagctgggcatggtggcatgcacctgtagtcccagctactctggagggtgaggcaggagaatcgcttgaacccgggaggcagaagttgcagtgagccaagatcataccactgcactccagtctgggtgacagagcaagactctgtctcaaaaaaaaaaaaaaaaaagtcgtgggaagcagcagcagcttccccagctcctcagctcttccggcatctacattcggtcccactccctgctcttctgctctgcacatgttcagtagccgccccacgtggctgtgcccttggcctttcgaggctggtcacggcaggttactaccagtcaagtcccagccttgaccagggtgcacacaggtgtgagtctgagccaattgtgggcctaaacttttaaaagtatgggtcacctgccaggcgcggtggctcacgcctataatcccagcactttgggagtccgaggagggtggatcatgaggtcaagagatcgagaccacctggccaacatggtgaaaccccatctatactaaaaatacaaaaattagctggctgtggtggcgcatgcctgtagtcccagctactcaggaggctgaggcaggagaattgcttgaacccaggaggcagaggttgcagtgagccgagatcgtgccactgcactccagcctggtgacagagcaagactctgtttcaaaaaaaaaaaaaaaaaaaaaaagcatgggtcaccacccacacagacacaaaatacttatagttatcctttaccataagattttgctctttaacaaataagttggctgggcacggtggctcatgcctataatctcagcactttgggaggcccaaggtgggcggatcatgaggtcgggagttcgagaccagcctggccaccatggtgaaaccccatttctactaaaaatacaaaacttagccaggcgtggtggtgcacgcctgtaatcccagctactcaggaggctgaggc[131 bp omitted]aagtttttagtcagacatggtggctcacgcctgtaattccagcactttgcaaggctgaggtgggtggattgcttgagctcaggagttcgagaccaacctgtgcaaaatggtgagaccccttccctacaaaaaatagaaaaattagtccggtgtggtggtggcacgtgctggtagtcccagctacttgggaggctgagggaggaggatcacttgagtccaggaggcggaggttgcagtgagccaagatcgtgccactgcactccagcctgggagtctccagagggagaccttgtctcaaagaaacaaacaaaaaagtttttaaatactaatttttctcgtacgttcttgagaacattcatctttttaacttcttcttagtgctcttggtgcccctgggtacttccagtttattttggttctaaacacccaaggcaaaccaaggtctcactgcatggctgtttgcgaggtaggggtgtttctccagaggtcctgaccatcaggaggcacccagccgtggtggctggtggtgtctggctgttaccagcattcaccagccttgaccggctttgactgattgtgactggccttcactggcagtgcctgacagggccccactgaagctttgaccacaagtgtccacctgttaccagtggcagccagctgtggccagcattaaccagcctttactggcagtgtccagccatgaccagtattaaccagcagcaactgactgtgaccggctttgaccagccttgactggccgtgacaacccttggccaacggtatctggctgtgaccagtggtgtctggctattaccacttatgaccagctttaactgtccctgactgttggtgactggccatgaccagccttaactggctgtgacaggctttgaccagcagtgtctggccatgaccagcagtagccagcagcaactggcaatgaccggctgtgtttggtttggctagctgtgaccctgccaccacctgtgaggactgctagtccaggttcagggccctggactccagggctgtgcagagcccggggtcagtacagggaggggagtggaatgttgtgagggaaccccgtggggatgggccaggagagggtgcacctgaggacagctcactggctacctaacagcagaagggccttggggaaacagatcttgaaggcatcagctcaacttcaggcaggtggcacaggagggaggccgggatgcctgtgtgtcctgagtattccggataagtacaaattcatgccccttggctcttccccagccccgagacctggagcttcacaatgcagcctctgaggcccgtgtgtcagagaatgatccacaacccagagaatggatgggagcggcagggccaaagaaggagaggatgaggtggttaaagaaaaaagaaaacaaaattgtaggaaggactggaggagcggacaatgggtgggatttgtaggaacaacagtcacaaccacaccacagaactgacccaccaagggagctgctccttctgaggctgccccagcactggtgaattcaagagtgcattgttaggccaggcatggtggctcatgcctgtaagcccaacagtttgggaggccgaggcggtgaatcacttgaggtcaggagttcaagaccaacctggccaacatggcaaaatcccatctgtacaaaaaatacaaaaattagggccagg[138 bp omitted]gtggcgggcacctgtagtcccagctactcgggaggctgaggcaggagaatggcatgaacctaggaggcggaggttgcagtgagctgagattgccctactgcactccagcctgggtgacagggtgggactctgtctcaaaacaaaacaaaacaaaaaaccacattgtcatggctgtaacccaagactcaaaaacttcatcctccatcagaagagcttcttgatgcccagagggctggacaataggcactggggccctgctgaagcaaagaccttcatctcatagccttgcctgtgtgagctgaagtcaaagcaggcaggagagcagctgctgccccatttccaccttccaaatcttcatgaatgcaaagattggcagaacccaacttatatgcagaacctgagctgcaaaggattctgggaaatgtaggacttggcttttttgcatctgagttcccaagaacagcaaagtacgaaaatatcctcaacataggaacaggagagtggaggcagagctggacatggtggcacacacatgtagtcccagctacttgggaggctgaggtgggaggattgcttgaggccaggagttcgagaccagcctgggcaacatggtgagatcctatctcttaaaaaagagaaaaagggtggaggcagtttgagaaagtggccgggactctgaagccacgtagagtttgaattacattaatgagccgtgtgaccttgggcaagtaacttcacctctctgatctttgatatctcactatgtgaaatgggctcattaaagaacctgggtcattgtgaggatcttgtaagatctcatacgtgaagtacttcacatactggcacagtaagcactcagtgaatgagagctattgttattgctaaacgaaacccacaccttaagaaggtaaaaaaggaaaagcaaataaacctcaaagaaagtagaagggaccggaattggtggctcatgcctgtaatcccagcagttcgggaggctgaggcaggaggattgcttgagcccaggagttcaagaccagcctggacaacatagaccctgtctctgccaaaaataaaaattagctaagtgttgtggcacatgcctgaggttctagctacttgggaggctgaggtgaaaggatccacttgaggccaggaggtcgaggctgcagtgagccatgatcaccccactgcactccagcctaggcatcagaacaagaccccatctcaaaaaaagtagaagggaggaggcattaaagagaataaatcagtgaaggagaaagaagaggtacaataaagcaacaaaacctaaagttggttttttgaaaagattaataaaatcagtctgggcgtggtggctcatgcctgtaatcccagcactttgggaggctgaggcgggtggatcacttgaggtcaggagtttgagaccagcctggccagcatggtgaaaccccatctctaccaaaaatacaaaaaattagctggatgtggtggtccacacctgtaatcccagctactcgggagactaaggcaggttcacttgaatctgggaggtggaggttgcagtgagctgagatcatgccattgcactccagcctgggcaaaatgagtgaaactctgtccaaaaaaataaataaataaataaaatccaatggacccctggtaaaaatcaattaaggaaaaaagacagcaaacatgaatcaccagtatccacaatgaaaaggggaactttgttctaacattaaaagatagtaagatgatattaggaactactttgtgccaataaatttaacagcttagatgaaatggacacattactttaaaaacacactgtatcaaaactgacacaagaagaaatagaaaacctgaacagtcttatattcttgttaaagaaattgaattcgtaactgaaaaccttccctataaagaaaatttttggcttggatgactcccaccagtggaattcttccaaacacttaaagaagaaataacactaaccttagacaaacttccagagaatagaaaaagagggctctcttcctaacatgtttatgaggcagcataatcctgatattccctgtgttcccagagctcacagcccagtatgggatggggacatatatgagaacagacattgacagcacagtgattgaagctgcagtggggagcccaggggcctgtgggaacccaaaggaggaggcacgtgactcagcctggggccgggggtggtggtagattatgaactgacacctgaaagatatgtaggagtgagtcaggggaaaaggtaggagtaatgttctaacaggtgagacagccagtgcacaggctagtcacagtgacagaatgtggcatgaataagtacattagcaaacgtttggtgtggctgggctggacctcaagaaggtgggcattgctgggagaagagcggtggacaaggatgccccctggaaaccttccctgcctcgttttccctcagtgcccccctcttctccggtctccaggggtctcccctgactcagcctcggtggctgggattactcatgaacctttcacatctttgggacctttcaccatctcctactcaccctgggttcccacatgagcccctgacttattcatcgatggggagggcagagaagggaagagggagaagctcaggggcatgtcttcaccccctcactcccttcctggctgtgtctcctgcagaacaacctccctcctagcatgatgacccgcagaaacacctacgtttgcacagaacgcccgggggctgagcgcccgtcactgttgccaaatgggaaagaaaacaggtacggagggggcagcaacagggtgaggggtgggaagtagggggtaggtgaacaggacctcccttgatctgagatgataggcattggaggctggtgccatggggaccagagagtgagtgtatctgccctgcccttggcagaatcgacccatgtacccccctgaaaatcctccccacttaattaattagtcttaagcaccaggaaagcagttggccctgttctccgcctacaagccttgggaacctgaattgattttttgaatgatccatttttagaactcgagagaagccccagaatgtcacagcttcagcgtcatctggttggctggttttccggcttgttggcctgagtctgtgaggtctcttccagctggcaagggagggaaaccagttcagactggctggagcagagagagggaagggattggttcacatcacaggtcaaggccagctagaatggggccagctccaggatgaggacactgccccccaccagggctgtagggcaggttgatggccaacaccagggcacactctgggatgcacctgattagtgggtgcaggtgttcccactgggtgtgggcagaggaatggggtagttaacagtcacaaatctgtccaggcacagtggctcatgcctgtaataccagcactttgggaggctgaggcaggtggatcaagaagtcaggagatcgagaccatcctggctaacatggtgacaccccgtctctactaaaaataccaaaaaaaaaaaaaaattagctgggtgcagtggtgggcacctgtagtcccagctactctggaggcagaggcaggacaatggcgtgaacctggaaggcggagtttgcagtgagccgagatcacgccactgcactccagcctgggcaacagagcgagactccatctcaaaaaaaaaaagtcacgattctgtgaatactcagttctgagttcgaatcttacctctgtgctcacactgctagcagaatgaccgggtaaatccctgtgcctctgtttcctcctcggtaaaatgggcttgatgctggccgggcatggtggctcacacctgtaatcccagcactttgtgaggccgaggtgggcagatcacctgaggtcaggagttcgagaccagcctggccaacatgatgaaaccctgtctctactaaaaatacaaaaattagccaggaacgatgtcatgtgcatgtaatcccagctactcagaaggctgaatgaggcaggagaatcgcttgaacctgggaggcagaggttgcagtgagctgggattgcgccactgtactccagcctgagccacacagcaagaatccgtctcataaaaaaaagggctgatgctgtccacttccaggccccattatagagatgcagtagagatcaggtgtgtcctgtacctggcactgggtctgatgcttaggaggccttcattcagtgacttgagagtgcttttttttggtggttatcaaataacaatagtgaacattcatgaagcagcagctacatgccaggcttctatgtctattgcctggctcagtgcccctaacaactctgtgaggtagatcctaatatctccattttacagctgaggacataaggcacagagaggttaagtaacttatccaaggccacacagctggtaagtcaagaagcagattccagacttgactccagaatcttatttgtaatcactgtagtacatggccttccagttctgctcaagagatagtggaacagttaaattacagactcagacaaaaaaaatcaaaaattaaaaaaaaatttaaaaacaacaaaaaataaaaagtatagactcagctagctgctgtaataaaaacaaagagatcccagggtagagtaatttaaataaaaaggacgtttagtccggagggtcctccaaggacccaggtaagttcttccagccccaaaatgagtttccagctctgggactgaggccgctgcaccagcagccatcatttcccaatcaggaagaagtggggaaagagtaggggacaagcaacaactctttgtaaaggcgtcacccagagatggtacagagcacttctgcttatatcccattggccggagcatggtcacataaccatctctagctgcaagagagtctgggaaatgtagtctctggctgggtggccatgtgcagtgctcatactcttaggggtttggttaccaagaacgaaacagggaggatggattctaagggagaagtaacagcctctgccacaatcaggattcttctctgagatccaggctgggcctggagtccctgggaggatagaaattggaggtctgggctgggcgcagtggctcacacctggaatcccagcactttgggaggccaaggccagtggatcacctgaggtgaggagtttgagaccagcctggccaacatggtgaaaccccatctctcctgaaaatacataaactacccaggcgtggtgctgcatgcctatagtcccagctactcaggaggctgaggcaggagaatcacttgaacccaggaggcagag[133 bp omitted]gaggcaggagaattgaactcaggagatggaggtctggcccctgctgtcgactaggagggtccgaggggctggaggagggtcctgggacagtggaacccccactgcccagattaccatagtgaatacaggtatccttgacctttacatctatccctttcctgattttagatggtgagagttcagatagcaaagtgtttgccaagttgatttggttcctgaggtttcggcaaatagcaaggaagtcacccaaaaatgtctgtgcatctattcagttgctgcgtttagagagaggagagttgtgataggagatgatttggagcgggtagagtttgaagaagggacagtttgaaggaggggtaataggagaggagagagtcagtaaaataatgctaggattgtatagtgcacagcctgcacaactgtacgttgcagccctgtctctgagttccaggctggttgcagtccctggtctcaggacaggaatgtgaagaatcaaagggactggggccctggcctgcctcagtcccccaccctgacttgtctgtctctgcccacagctcaggcaccccacgggtgccccctgcctccccctccagtcacagcctggcacccccatcaggggagcggagccgcctggcacgtggttccaccatccgcagcaccttccatggtggccaggtccgggaccggcgggcagggggtgggggtggtgggggtgtgcagaatgggccccctgcctctcccacactggcccatgaggctgcacccctgcccgccgggcggccccgccccaccaccaacctcttcaccaagctgacctccaaactgacccgaaggtgagctccgcggggatggcaggggcagggcggggcggggggccgatgggacctaacctgtcttccactctgctctgtctcctgtaccccaacatttcctcttcctcctcctcctcctcctcgtttcctcctcctcctcctcctttcctcctcccctgtcacccctcacctccctcctcacactgcagggttaccctcgatccctctaaacggcagaactctaaccgctgtgtttcgggcgcctctctgccccagggatccaagatcagtaagtcccgtccatgccctgttctcgctggctctgcctccctgcctgcatgtctgacctgtgtgtgcgggcattgggagggggctctgtggatgtgagggtctgtgcgtggggtctggttgttcatttactcacagaagcacagcctatggagccagactcgggggttcaaatggcagctctgccaagtgaccttgagcaagtcactcaaggtctctgggcctggttttcctcttctgtaaaatgggtatagtaataacaatacctgtctcctagggttattgtgaggactaaatgaagtgacgtatggactgagcgtagaacattgccttggaaagtgctttacatgtgtattagttattaattgctattattcattgagcccctactgtgtgcctggcactgtcctaggccctgtagtagagggtgagcaaaatgtacaaaactcctgccctggcagacccaacattctactaagggatctagacaaaaaacaaagaaataagtaaaatatacttactatatagactgctaggtagtgcgaagtaactaagaagaaaaatagagtaggagccaaatttggtggcttatgcttgtaatcacagcactttgggaggctgaggcgaggggatcacttgagcccagaagttcaagaccagcctggacaacgtagcaagatcctatctctacaaaaaagtaaataaattggccgggcgtggtgactgcacctgtattcccatggaattgggaggccgaggcaggaggatcacttgaacgcaggaggtcaaggctgctgtgagctatgatcatcagtcttggcaacagagggagaacctgtctctaaaaaaaaaaaaaaaaaaaaaaaaaattgaacagggaggggaataaggggtgtggggaagggatggggtgcagcattaaatgggcaggcctctggatgaggtggctcaggccagcaatcccagcactttggacagatgacttgagtccaggagtttgagaccagcctgggcaatgtggcaaagccccatctctacaaaacaaaacaaaaaacaaaaagcagatgtggcacgcgcctgtagtcccagctacttcaggggccaaggcaggaagattgcttgagcctgggaggttgaggctgcagcgagctgagatcacgccactcctgcatgacagagtgagactctgtctcaaaaaaagaaaaaagggcaggcctcacgaaggaggtgttgtttgagcaaagcatgaatgtatatgtgagcgagggagtgtgtgtgtgtgcacacgtgcgtgtgtctctctctttctctctgtggccacttatctatgtaagggtgtgtctctgcccactcccctccctttcatcttccacattcttcagtatctttcctgtgacctgcactaaccatttcagaatgagccccgttatggggatggacaaggagatcaaatcctgactccaggccctcaccagcccggagggactggggttgaggcaggggctgcttggagtcccagaggcagtgggttgcgggaggtgggttccctatgtccagattagacactctgtccccctcccctcccctagggtcgcagacgaacctgagagaatcgggggacctgaggtcacaaggtgagtgcttgggcctacccctgactgccacttcccctctcctgcctcagcacctcccgacacttaccccagggcattagatggggccccagtctcatcctgcaaggccaacttcctgaaatgccctgtggccccagccttctctgccagctcctctcattcccacccaaccccaagcaccttcccttgatcatcttaaacttcagcctccggctgggtgccatggcccaagcctgtaatcccagcactttgggagtccaagggaggcagatcacctgaggtcgggagtttgagaccagcctaagatggagaaaccccgtcgttactaaaaatacaaaaattagccgggcgtagtggcgcatgcctgtaatcccaactactcgggaggctgaggcaggagaatcgcttgaacccgggaggcagaggttgcggtgagctggattgtgccatcgcactccagcctgggtagcaagagtgaaactccgtctgaaaaaaaaaaaaaaaaaaaaaaaaaagcctcatcccatccacaactcaactcctcttctggtcaatgcccccacctccttttgcctctcatccagtcatggcacaatgtttgctggcagctcagggccagcaggaggcaaacatctgtacggacccagatcatgaagattttaggctttgagggccaggcaccctgtgtcacgcctgttcagttgtgccattgtagtgcaaaagcagtcatattcaacacaaaacaaatgggtatggcagtgttccaatgaaactttatttacaaaagcagacagcactggagtttgccaagccctggttttgtctgagttcccggtttagagacccaagtggaaaccggagccttcccagcagctgcaacaaactgccagggctgactctcattggttgggacttggtcacatgctcattcctaaaccaatgcctgcagccagagaggagaagtactctggttggtcagacctggtcatgtggtcacccttgacccaagcacagtggccgggaagtagaatgctatcattggcagagctgagtcgtgctcacccaagctgaggggcggccccaccggaacaagggaggctagtcctgggatgctcatgtagagcagcactctcgtacttcaggcgggacgtttctttgttgtgcagggccctcttgcacattggagaatgtttttcattcctgacctaccccatccccaacctagtcagtgccagcagtgctcccatcctaagacatgtgacaatcaaaaagcccccagaggccgagcacagtggcttatgcctgtaattccaacaactcaggaggccaaggcaggaggatcacttgagcccaggaggtcgaggctgcagtgagctgtgattgcactactgcattgcaagaccctgtctcaaaaaaactaagaagtggccgggcactgtggctctcgcctgtaatcccagcactttgggaggccaaggcaggtggatcacctgaggccgggagtttaagacctgcctgcccaacatggtgagactccgtctctactaaaaatacaaaaattagctggccgtggtgcctgttctcccagctacttgggaagctgaggcaggagaattgcttgaacccgggaagcagaggttgc[132 bp omitted]gcgggcagatcacaaggtcaggagatcgagaccatcctggctgacacggtgaaaccgtgtctctactaaaaatacaaaaattagctggggccaggcgtggtggcgcgtgcctgtaatcccaactactcaggaggctatggcaggagaatcgcttcaacccaggaggcggaggttgtggtgagccgagatcgttccattgcactccagcctgggtaacaagagcaaaactccgtctcaaaaaaaaaaaaaaaaagaaaaggaaaaagaaatttctcattcaaacattcaaaccatgtggccaagccaggctggtaaggccactgtgatctatgcggtcattcaggtccccaggttattgcatcccgattccctggagcccttgtcatcttcacagttgaggctggcctgtgccactgctaagtccagctcctgggagatgtgggacaggagagcctggcacatgcaggttctttgaaggaactgatgtggatggcacatctcacttctgctcatgtcccagaatttacagacaaggtcacacctggttgcaagggaggctggaaagtgtggtctctagctgggcagctctgtatccagttgaaactgtcgctggggtaacaggggaagatgttttttgaggggatggctaggaatgtgtcccgaattgggaagagttgtcccttcagccctccaccacattcctcttcgctcccatctctgacccctgacatcttctcgcctcagttgccatctaccttgggatcaaacggaaaccgccccccggctgctccgattcccctggagtgtgaagctgaccagctcgcgccctcctgaggccctgatggcagctctgcgccaggccacagcagccgcccgctgccgctgccgccagccacagccgttcctgctggcctgcctgcacgggggtgcgggcgggcccgagcccctgtcccacttcgaagtggaggtctgccagctgccccggccaggcttgcggggagttctcttccgccgtgtggcgggcaccgccctggccttccgcaccctcgtcacccgcatctccaacgacctcgagctctgagccaccacggtcccagggcccttactcttcctctcccttgtcgccttcacttctacaggaggggaaggggccagggaggggattctccctttatcatcacctcagtttccctgaattatatttgggggcaaagattgtcccctctgctgttctctggggccgctcagcacagaagaaggatgagggggctcagcggggggagctggcaccttcctggagcctccagccagtcctgtcctccctcgccctaccaagagggcacctgaggagactttggggacagggcaggggcagggagggaaactgaggaaatcttccattcctcccaacagctcaaaattaggccttgggcaggggcagggagagctgctgagcctaaagactggagaatctgggggactgggagtgggggtcagagaggcagattccttcccctcccgtcccctcacgctcaaacccccacttcctgccccaggctggcgcggggcactttgtacaaatccttgtaaataccccacaccctcccctctgcaaaggtctcttgaggagctgccgctgtcacctacggtttttaagttattacaccccgaccctcctcctgtcagccccctcacctgcagcctgttgcccaataaatttaagagagtccccccctccccaatgctgaccctaggattttccttccctgccctcacctgcaaatgagttaaagaagaggcgtgggaatccaggcagtggtttttcctttcggagcctcggttttctcatctgcagaatgggagcggtgggggtgggaaggtaaggatggtcgtggaagaaggcaggatggaactcggcctcatccccgaggccccagttcctatatcgggccccccattcatccactcacactcccagccaccatgttacactggactctaagccacttcttactccagtagtaaatttattcaataaacaatcattgacccatgcctactccatgccaggcccagtgctggacacagagacatgaagctctgtctgtgggagacagggattctgacacagacaccggacaaaccattgtcttggggagcccagaagagaaagtgggcagggtggggtcattggggaagatgctctagaggaattaatgctggaatggggtgttgaaggatgagtaggagttagttaggcattgagtttgccctgggcaaaagcccagaagtgggagtatgtggtatatcttcagagaactgggtaatttcagtgtggctgctgtgttgggcatggatggagaatcagcaagagaaatgctgtattaggactaataatccatctacgctgcttaagcaaaaaggtatttgttggtttatgttacttaatagtccaggggcacctggcttcaggtaggtttgatccaggcatcaggccattgcatctattttttcagtgtaagttgaattctagtaatttttatcaagtaagggctcctttcctggtggcacagatgacttcagcagttagaagtttctatccctccagctttctgcagcagaaagaccctcattgtcagtttcccagcaaaagtcccagggcagactctcattggcccaaatgggccatgtgattttctctaaaccaatcactgtgactctagagtggccagactcagagctgcacttagtaggggttcctcaaaggaaggtcaagtgtcatgagcaggagaaaaggcatgggagctggacagattatagtggttgaagtctgtgcagtacagaagggcggagcttattcacacagcacctttggggccaaaatgaataagctggactttctccccatggcactggggaaccatggaagttcagggaacttcagggaagaggcttggtcaattcctgagagcatcctctgtgctggggacacagtggtaatcaagacagccccaacactgccctcatagagctcacagtccaatggaggaggcagatgtgtcctcaggcagcgactgggcagggctggtataggggagtccagaggtgatgcctgcctcagccagggagggcttcctggaggagaaggagccagctagacatggataggagtgcgttttaggcacagcaaatggcacatacaagggccagggagcaagagagaggacaggtcctcaacaaatggcatgtgactttgtaagtgtagaattgctgtgaggtatggggctaggggcgtcagtagggccttgaaggttatggacaggggcctgggctttcttccaagggcactgggggagccatggcaaggttgtaggtagggtagagatgggcgggtttgtgctatgtgcagggtggaagggagggaagttgacaggtcagaagatcaggaaagaggtcggggctggacagatggggagagcgcagatagatttaagagagtcctgtgaggcaaagtgggcaggacctggtaacaggtgtctggactgtggctttggctggctcagaaggtccccactggcgtgtgtggtctatgtagcctctgggtgtggagctgggatcttcaactggggacagtacagtaaagaacatcacagcatctcacaggttctgcataccttaatgtttagaatctctcctaaccttccttgtagtaatctccctgggaacttttggggacatccctaggcctcaatttcccctctgtaaaacagagggcagattgaactacaagggcccttaatctctgtgactcttgaggtttgaaaaagcaccttaggttcctgagggctttgtcggttcttccatttactcccacctcacttttttttttccctaaaacgtttgtcttttggggcccaccgactgtgtccttgttaacgtagacattggcctgtttgactgggtggaggtgattgacgtgcccaacacccaatgcatgttcagctactgcttgacttctattaactcttctccctccaccaattgctctaccacacctctttcctgttccttcctgggactgagttctccaaaaggcctatccctaaagacttcatggggatgctcagactcacagattggagagggaaacagcttggtcaaagacattgaggtgggaattggagggtgtcaggtgtgaaagaatcagaggagtaatggggaaagaactggaaaggtgagcctccagcaaatggtatgcatttcagtgtggccttgagttgcaaaataacagaaaagctttctaggagaaatggggagccatggcaggttcttgagaaagtaagggactggcagcagctacagagggatgaagtcagacgggacagaaggaggccactgagaagcagaatataggtagatgtgacgagctgcatgggaggtctcaaaactggagaccgttgggctaaattcaagtttcagacatttcgtttggctgcattcctccccagcgtggacctcgtgtttgagatctgagcatgactaattcaaagccatagttggaaagggcccatgctttgggtgagtgacactgggctcagtgtctctctgggtctcagattccccatagagccttctaatttttggactagattctgtgacctaactttgcctcattttagacccgggataagacatgtttagtacatgcctagacaggacaaaccactctgagaccacacagtggccaattgcacgtcctccctcaataactatcgcacaaagctaaggccaccaatgcttttatttatcgctttgcgtggagacaaagcacaagctccgagtgtgctgggagctctccattaactagagctcctggttggggtggagctctgggaaaagaagaggaccctgccagggagatatttcattggccagaatccagaggatggagcccattggttggaactctggttgaaactggaactctgagaagggtggagagagcccccaggtgggactctgggacagggggcggggcgaggagtgagggagcaggactctggtgggccaggccctcccactggctgggttccagcagtcggtggcaggtgggcaggcgcctacttctgggcggggatcatgtcgtcaatggactggcctttctccaacttcttctccatttccaccatgagcttcacaccatccaccaccagctgcacctgttctacttcggacgagcccagccgatcagcgttggacacgtcaaatactgagcccacggcagctgtgtccacgccacctgtgggagcaagggacaggggcgtgaagaggcagcgaaggtgcagaggggctgggacgtggcccccgtgccaaatgcaacagccgcatgtagtgagtgcctactgtgtaacaggttacctgcacacaggtaatgcctgttcattcgtgagctcacgagtctctgacttcagatggggtaccacgccactcagttatcaaacatagtatagtgggtaagagagtgggttctggagccaggcggcctagggtcgaatcctgaccactcctcgctttataaatggggaaactgaggccccgagggaggtccaagggcatgtgcaatgcatattatataatcatgaaaatcccacattgactcctatcacataggcatattgacacccattttacagaggaagaaatgcaagctcacagagggtcagcccttgccggatccccagaactcgcagggatgtcgcacctctccttgcatccctgcaaagggccctcgctccccctccgtcgtggtgcaaaggatgtgggagccgtacctgtacccctcttctgcagacgcaggcgggtgaggatctcctcgaacttggggtgcttgctcaggtgcgccagcttcacatgcacgcctccacgcagcccagtgcccaggttggatgggcaggtgagcacgtagcccaggtgctggttccacatgaaggggtggccagctttcttaaagatctcctcaatctgaggttcagagagaggaccaggggtcagcgccggcaggcacccccaaatgcacccgcaacatggacagggtccggagggacagggcgtgggaacgtggtggaggtgggattctgaggggaacagggaggtaggagattccgagggtgctggctagacaatggggaccaaggcaggattttgaggggcggggactaagaacgctttgaaggcgggttttttttttttttttttccagagtctctctgtgtcacccaggctggagtgcaatggcgtgatctcgtctcactgcaacctctgcctcccaggttcaagcgattctcctgcctcagcctcccgagtagctgggactacaggcgcgcgccactacgcctggataatttatttatttattaattttttagtatagagac[139 bp omitted]gctgggtccaggggcggggccctgaaaagcgggtggggctagttttggggggcggggtttggcatggggtggagccaggtccggggggcagggccctggaaaatgggtggggcagggcttagtataggggaaggggcggggcctcggaaagcaggtggggcgttcaaggtggagtcagaagtcagcagctaagggcagacacccaccttctgcagccctacgcagaagcggcggaaaacctccttcatgttgccccccttctccatggagatgacccggaggtgatcctcctcgttcacccacaccaggaagctcttgttgtcattgtgcctagagtaaggtgccgcagcaagaggccaaggtgtcagccccgtgggaaccccattcccagccctcccccaaaacatctgcccaccgatgggggaagagggcctgaggggtgggaggtgggtggcatctgcctcctcaaaacgcagaagcttaaacctgtagactctaatgtcacaggatctgcaaaacgctgaatcctgggatcaaggacttttagggacttaagtctttgaacagtattattatagatccttgggatctcaggatgtttgacaaacagaagcttgggatcagaactgataacacttggtaatcctacatctggtttcaggaccagaaaatcttcccatcgtagtgtgttagctccc[151 bp omitted]cctgtctctactaaaaaatacaaaaaaaaatctgggcatggtggcgggcatctgtagtcccagctactcaggaggctgaggcaagagaatggcgagaacccgggaggtggagcttgcagtgagtcgagatcgcgccactgcactccagcctgggcaacagagcgagactccatctcaaaaaaaaaaaaaaaaaagaacataaaatattaagatccggaaatggccgggtgtggtggctcatgcctgtaatcccagcactttgggaggccaaggccggaggattgcttgagcccaggagttcaagactaccctgggcaacatggcaagacccacatatctacaaaatttaaaaaattagcaggcatggtgggacacatgcctgtagtccaagccactggggaggctgaggcgggaggatcacttgaccttggaaggtccaggctgcagcgagctatgatcccaccactgcactccagcctgggcaacagagcaagaccctgtctcaaaaaaaaaaaaaaaaaaacctgagggcaggcatggtggctcacgcttgtaatcccagcactttgggaggctgaggtgggcggatcacttaaggtgaagagttcgagaccagcctgagcaacatggcagaacgctgtctctaccaaaaatacgaaaactagctgggcacagtggcacatgcctgtcgtcctagctactaaggaggcggagggtgagaggatcgtttgaacccgggagatggaggtttcagtgagtcgagatcaacccactgcactccagcctgggcctcagagtgagagtccatctcaaaataaataaataaataaatgagtggaatcttaaaacctaaaaatatttaaaatcttgaaatcttagaatcatcccatctgtatatcttagcacccaggctcccttcatcgattgaaacctaggttctctaaatctttgactatctgaatcagggattcaaagagtcaaaacaagtctagcaataatactttataataaagat[134 bp omitted]agctccgcctcccgggttcacgccattctcctgcctc[224 bp omitted]tcctcacaagaacaccagaaactacaaattattgtgatccctatcctatagctaggaaactggggtagagaaaaataaaataagttgcccaaggtcacaaagctagtaaagttagtaaatggtagagctgggatttgaacctagggagtacggttcaagtctgagttcttatttttgagacaggtagctggagtgcagtacctcggtcatgattcacagtaacctcaatcctctgggcccagctgatcctcagcctctcgagtagctgggaccacaggtatacgccatcacgcctggcttttttttttttttttttttttttttttttttgagacggagtctcctgtcgcccaggctggagtgcagtggcacgatctcagctcactgcaagctccgcctcttgggttcaggccattctcctgcctcagcctcccaagtagctgggactacaggcgcctgccacgacgccgggctaattttttttttttttttgtagttttagtagagacggggtttcacc[140 bp omitted]tgcccaggctggtctagaactcctgggcacaagcgaccctcctgctgcagcctcccaaagtgctgggattacaggtgtgagccactgtgcccggccaagtctaagttctttcttttttgtttgtttttttttgagacagtctggctctgtcgcccaggctggagtgcagtggcacgatctcggctcactgcaacctccgccacctgggttcaagcgattctcctgcatcatcttcccaagtagctgggactacaggcgcctgccactacgcccagctaaatttttgtcatttttagtagacaccgtgttggccaggctggtctcaaactcctgacctcaagtgatccccccgccttggcctcgcaaagtgcagggattacaggcatgagccaccgtgccccgccaagtcttaagtttttaactaccacttctccggtccagatatcccaaaatctgacacacagaccacaggatgggcaggggcggagggcaagatcattttccgtggcatttagaagatcataattacgtatatggccttggttttggtggaggagtgaggagggccgttgcaggactggaggaggctgggggaagaggaagccagggggcggggaggggcctcaccagatgccacgggcgtcgggccagtcgcgggccatgcctgaggccagcagcagcggggacacgggcttgtcgaacaggaagtggtcatcgatgagctgctgctgctccttctccgtcatgctcttcagagggtagtacttccctttgaactcgcccgtcaggctgttgagagctatggggacacacgagggagtggtcagcagcctgtcccacctcaaccagggtgtggaggcccagggtttcccctgctgctgctcctaacgggcctgggccttggccccctggatgtcctaaaggcacctgaaccctgtgtctaaacccacacttgtgacggctccccaaaatctgttcctgccatctgtccaggcccccaggaatggccaccccatgtgctcaatctggaaaacagacccacctcttcccctgagggaccctcacatccaatccacctgcaggccacagtgtgctggtgcctgctcctaatggctggcaacacagatggctgaagtctcaggactttgagaggccattagtaaaaattattataaagtagaatggtagccaggtgcactggcacgagcctgtagtccagatactggggaggctgaggcaggaggatcacttaagcccaggagttcgagtccagtctgggtaacatagcaagacccccatcttttttttttttttttatgagacggagttttgctcttgttgcccaggctggagcgcaatggcgcgatcttggctcactgccacctccgtctcccgggttcaagcgaatctcttgcctcagcctctcaagtacctgggattacaggcatgcgccaccatgcccggctaattttgtatttttagtagagacggggtttctccacttgggcgcctggcccaagaccccaatctttaaaaaaaaaaaaattgtaggctgggcgcagtggctcatgcctataatcccagcactttgggaggccaaggcaggcagatcacttgaggtcaggattttgagaccagcctggccaacatggtgaaaccccgtctccactaaaaatacaaaaattagtcggccatggtggcacacgcctgtaatcccagctactcaagaggctgaggcacgagaaacacttgaacccaagaggtggaggttgcagtgagctgagattttgccactgcactccagcctgggtgacagagtgagattctgtctaaaaaaaaaaaaaagaaaaaaaattgtgtgtttatttgtatattcatgtataaaatatgtgtataatgaatttgtgtttgtgcatatgtacaataaatctataatatttatatatcttatacatattcatataatatacagacatacctcgttttattgcattttgcagatactgtgttttttacaaattggaggtttgtggcaactctttgtccagcaggtctattggagccatttttcctacagcatgtgccacttcgtgtctctgtgtcacatgtgggtaattctcacagtactgcagactttctcattattactatatctgtcatggcgatccgtgatcagtgatctctgatgttactgttttaattttggggggtgccaccgaccttgcccatataaaagggtgaacttaatggataaatgtgtgtgctcggactgccccactgaccagccattccctcatctctccccatctccttgagcctccgtattccctgagacacatgattttgaaatcaggccaattcagttcataaccttacaatggcctcgaggtgtt[131 bp omitted]agaccagcctggccaagatggcgaaaccccgattctactaaaaatacaaaaattagccaggcgtggtggcgcatgccggtgatctcagctacttgggtggctgagacacgagaattgcttgaaccacgaggtggaggtaacagtaagccaagattgcaccactgcactccagcctgggcgacaagagtgtggctccatctcaaaaaagagattcttttcaaactattactgctggccaggcactgtggctcacacctgtaatgccagcactttgggagaccaacatgggaggatcacttaagcccaggagttggaggttatggtaagtcatgattgcaccactgcattccagctgggcaacagaacaagaccctgtcttgaaaagagagagagaaagagaaggaaggaaggaagggaggaagggagggaggaaagaaggaaggaaggaaggacggagaagaaaagggaagggaagggaaggaagggagggagggaaggaagggaaggaagggaggaagaaaagaaaggaaaggaaggaaggaaggaaggaaggaattgccgcagccatctcaaccttgaacgacaaccgccctgatcagtcagcagcccatcaacatcaaggcaaggccctacacaacagaaaggttccaacttgctgagtcctcaaatgatcacaacatttttagcaggattttaaaattaaggtatgtacttttttttttctagacataatgctattgtgcacttaacagactacagtataggataaacataacttttttttttgagatggagtcacactctgtcccccaggctggagtgcagtggcgtgatctcagctcactgcaacctctgcctcccaggttcaagcgattctcctgcctcagtctcccaagtcgctgggattacaggtgtgtgccaccagacccagctgatttttgtatttttagtagagatggggttttaccatgttggccaggctggtctcaaactcctgacctcaaatgatccacctgcctcagcttcccaaaatgctgggattacggtgtgagccactgtgcctggcctctttttatttgtttttgaggcaggttctcactctgtcaccctggctggagtgcagtggcacaatcacgattcactgcagcctcaacctcccgggctcaagtgatcctcccacctcagtctcctgagtagctgggatgacaggtgtgtgccaccactcctggctcatttttgtcttttttgtagagacagggtcttgctgtattgcccagtctggtcttgaactcctgggctcaagcgaccctccctcctaggcctcccgcactgctgtgggagccactgtgcccggcctcaactcctcctatctgaggtggctcccctcggtcattctccaccacacccatgtcttggcttcatggcacttttgaattatcttgttcatctgtgggtttctgtatttcctcttgtctccccaccagctgaacactctgtgagaacagtgagggacccctatctccccacacagggcaagaacccctggaaatgtgtgctggatgaacggatggcaggacgctgggggcagccaggtgtctgcgtaggtcttctcaggggccgtcgggtctggacagcatccctgaatctccaacacagcaggtaatgctgacagcccgcgccattccccaagcccccacgatttaccaagctcttcccctactttgaaaagcgggggcccaaagagacccgaggacctgcccatggaggaacagagccagggctgggtgaccccagcagtggacggggtaggggcgctcaccttccacagagagcttctccaccgcccggcgctcgccacgggagcagtgtgggggcaacgtgtagcccttgatgctgcggccagtgcggacgcggctgctgagcacgtagttagggtccaggtcgtctccaccctggagagcgggtgggagatcaggaccaggcagatcctccgccctctccagcaagcccaggtctcccccagatgctcccctcagtctccctgttgcttcctttgccttctgcatcctcactgattgggtgtgtggagcctctccccgccacccatacctgggctctgtctctcccttctctgtctctctcccctctcctatctctgtttttctttatacctctctctccccatcttcgtatatttcttttccttttttttcttcgagacagggtctctctctgtcgcccaggctggagtgcagtggtgccatcatagctcactgcaacctcaaactcctgggctcaagcaattcccctgcctcagcctcccaagtagctgggactaacaggtaggtatatgccaccatgttcggctaacttaaaataaattttttataaatagagacaggggctgggcgcggtggctcacacctgtaatcccaacactttgggaagccgaggtgagccaatcacctgaggtcaggagttcgaaaccagcttggccaacatggtgaaaccccatttctactaaaaatacaaaaattagctgggcgtggtggtgcgcgcctgtaatcccagctactcaggaggctgaggcacgagaatcacttgaacctggggatcaggggtttccgtgagctgagatcgagccactgcactccaacctgggtgacagagtgagattctgtctcaaaaaaaaaaaaaaaatagagacagggtgtcactatgttgcccaggctggtctcaaactcctgggctcaaacagtcctcctgcctcagcctcccaacgtgatgggattacaggcatgagccaccatgcctagctaaatttttaggcttttttttttcttttttttgggcagagacgggttcttgctatgttgcccaagctggtcgtgaactctcctggcttcacgtgatcctcacacctcagcctccataagtgctgggattacaggtatagccactgcacccagcctttctgcccatttctgtttctcttcctgtctccctttctcccactctccttgtctgtgtctgactgcaactgcgtgtgtctctctctccctgtctctcctgccttctctgatgctcccttctgtctccctctgtgtctctgcctctccccccacccttttttttttaggcagagtctcgctctgtcacccaggctgaatagctaggattataggtgaacaccagcatgcctagctaatttttgtatttttaatagagactgggtttcaccgtgttggtcaggctggtctcgaactcctgaccttatgatccgcccacctcagcctcccaaagtgttgggattacaagcgtgagccactgtgcccggctatgcctcttccttttctacatgcttttgtgcctttcttctccctctccctctcctttgtctgtctgtctccttggttgtctgtgtctccttggctgtctctgtgtctctctgtccctctctctttcctttttttattttctgagatagaatcttgctctgtcacccaggctggagtgcagtggcatgatctcagctcactgcagcctccatctcctgggttcaagagattttcctgcctccacctcctgagtagctgggattacaggcacgcgccaccatgcccagctaatttattttatttatttatttatttattttttgagacgagtttcgcccttgttgcccaggctggagtgcaatggcacgatctctgctcaccacaacctctgccttccaggttcaagcgattctcctgcctcagcctcccacgtagctgggattacaggcatgtgccaccacacccagctaattctgtatttttagtagagacggggtttcaccat[140 bp omitted]ccaggctggtcttgaactcctgacctcaagtgatacgctcgcctcagcctcccaatgtccctctctctttccatctctctgcttctccacacctctgtgtctctctctgtctctgtatttctctgtctccccccatttctcctgtgatctctctcctcctcacccctcggccctcccctcctgcgcagacaccgaccttgaggttttcatggttgaggtcagtcttgtgcttgtcagtgggtttgtagcccccgtggcgatccgagatgatggggtcaaagagttccttgaaaacttcgtaggactcctcatcaccagccacgcagcccacggtcatgatgaaggggtgacctggaggggtgggggtgaggtcagagctgcttgtccccagcaaacagggcgtgggcttgtgggctcagtggagcctgtgtggacatgtgtgtcgggatgggggcgggtacattcaatacctctgggtgggaattgagaatcataagggttgggcacagtggctcatgcctgcaatcccagcactttgggagggtgaggcgggtgaatctcttgaggtcaggagtgtgagaccagcctggccaacagggtgaaaccccatctctgctaaaaatacaaaaattagctgggtgtggggcacacacctgtaatcccagctactcaggaggctgaggcatgagaattgcttgaaccaagggagtggaggttgcagtgagccaagatcacaccactgcactccagcctgggtgacagagcaagactctgtctccaaaggaaaaaaaaaaaaagagagaacactgaggactggtgggaactgggagggaaggctgggagaggtcaaggtggctgggaggggtcaaggtgggagagaagaaagagtgctgggggcggggtcaaaggagaaaggggagcttcagagggtacatggtgctaaaagcatcagcacctcggaaacattagcacccaaagtcatgacatcttagcctgaaatgttaggatctcaggctaccaccgtaccacagagggtcaggagggtaagagacttgaaagaccctcttgtttcccagtggaaaaacaggggccaggagagaggggcttctccccggcatcacacagtgagctggatgtgaggggcactagagcctcccctccactcccagctctcttcgccttgcaatgtcctttgagaaacaaccataacattaataacatcccctgtcagattctttttttttttttttgagacagggtctcactctgtggctggagtacagtggcgcgatctcggcttactgcaacctgcacctcccaggctcaagcgatcctcccaccgcagcctcctgagtagcttggaccacaagccctcatcaccacacttggctaatttttttgtattttttgtagagacagggtcttgctatgttgctcaggctggtctcaaactcctggcctcaagtgatcctcccacctgggcctcccaaagtgctgggattacaggcatgagccactgcacctggcccccctgtcagagcttgagcactcacttggtgccaggtgccactctaagcactgcacagccattgacttgtgttttcacaacgtgggcgcccatttttcagatgaggagactgaggttcaggaggtgaaccgacctccttggggatctcacattattctcgtgcatgtttattgcgtggtttgctgagtacctcgcactgtcccaagcctttatgtatattaatgcattgattcccacaacagccccattttacagatgagaaaactgaggccccccccccttcaagggtggtgggattggggcatggccggcagcctccagagcccccatgtagccccttcagtgctccactggggaggctcacctgggttgtccactcctgtctggatgacatcgtctacagtgaagccagatggagtctccttgtcccgcagcttcttgtagagttcaagggtcagtaccttggccatgtggttgttatgtttgctgaggtcggggtactcctcctcaggcttgtaattcagcttgaacttgttgtgggtgttaccgaatggcatggtggcggtgtaggagacctgatgggcagggcaggaggggaagattgaagattagctggcatcttttttcttcttcttcttctttttttttttttgagacggagtctcgctctgtcacccaggctggagtgcagtggcacgatctcggctcactgcaagctccacctcctgggttcacaccattctcccgcct[221 bp omitted]ccaggttggagtgcagtggcgagacctcggctcactgcagcctccacctcccaggttcaagagattctcctgtctcagcctcctgagtagctgggattacaggcgcacaccaccatgcctggctaatttttttgtatttttattagagatggggt[153 bp omitted]aggcgttggggtcaggcaggctgtgtaacttggagcaagagaaatcctctctctgagcccctgtgtctcagcaggaaggcatccggagtcttagatcaagggcctggctctgccgtatcccagttgggtgagcctggactagtcattcttgctggaaactcaatttccccaggtggaaaacgggcccctcccggaggctggaaaaatattttgtgtgggtaagagtgtaggttctggaatcagcccagggtttgattcccagctctgctacctacaaccagctgtgtggccaggggcaagttgcttaacctctgtgcctcaatttactcatctagaaaatgaggatcctaacagcacttgccgcatgggagtgttgaaaagattaaatgtgtgaatacaggtgtagctctcggaacagtgcctggtacac[133 bp omitted]caagcaactatcctgcttcagcctcctgagtagctgcaactacaggcgtgtgccacacctggctatttttttttttggtatttttagtagagttggggtttcgccatgttggccaggctggtcttgaactcctgaactcaagtgatccgcccacctctgcctcccaaagtgctgagattacaggcatgagtcacggcacctggcctgttgttgttattttaaaggttcgtgcgaggagctggtgagaaggtggaggtgagggtgctgctgggagtatgtgagcaggttcttggattatcaatccaaagacaaagggctgggtcgggggagggctgggtagctgcccccacctctgcctgctgacagttctcccacagggctcagaagggaagaaaagctcagcctctgggtcgtcagaggcaggttcaaatcccacctatgccatttccctgctgtgtgaccccaggccagtcactaggcctctctggacctctgtctcctgtgaactgagcctgccccgtaggattgccaggatcctctgagcttggccatgaggttggctgagcacaggccctggcatggagttggagcctggaaccctggtggctgctattattgttatttgttattactacttttttgcagagatggggtctcactatgttgcccaggctggtctgggactcctggcctcaagtgatcctccagcatcggcctcccaagatgctgggattatgcgtgtgagccactgcgccaggtcctactgttattattattttattcactggacccagaaaggagaagggacccagaaaggagaaggggcctccagcagcggtgggagacggggatgggaagcaggtgggattgtgggagggagattgggaccacggtgagctgaagccagggaagaggaacagggacccgccaaagaccttgggtgctgctgtccagggtggttatttttagaatctggcaactgcctgccatcccacccccagctgctgccccgccccacccccacattccggggctcggcttgcaccaagtcagcaggcccaagacaggtgggccagggtggctgggaggacacgggtccaggcctcggggctcaaggacatcctgggatggcagcccagaccccctcccttcagaggatgcccccctaatccctgccagggacaccccaggagagggcactgaggcagggtggtgaccccccccacaagagacataagcagaaagccccagagccacacacccccaccaccgcagactccccagatcacactgtaaactaagtcacacagtcacacttccaaactcaaggacatgcccaggacactcatgtgtccgctactaagtcagaaacaaggtcacagggacccacacagtagcaaacgcaaagaaagcctgcgacacctgctcttgcagactctgctaggcgacagacacacctcccacggcttgtggcgccagtgttggcgacaaactgtaatgaacacaggcctggctcaacagccccttgcagggggtgacagttggcagctgtcaggacccctttcatctcggatccctccccataacccaagacttgtgccgcagaaatcacaggtcccagtggggggttcaggcagcctcacagatggaggggcctcccagacacacaagggtcaaccttcccacgcaccgacctgcctttgtataggaggatgttggtggagcaaggggtgacacacagaccctttcccaagccaagcctctagcacccacagaaatcccctactctggcccccacccagattcccgccccgtgcagtacctggctgggctgggctgaaggggggctgtctgtatcctggaggtgacactgacccaaaggaagggccagcagccgtggccttatatagggggacctaggctgtgctattggctgggaggggttgtccccagggaggagttctggagggcagctgagcctctcacctccctgctcccgcaccatacccaccctgaacccaggcatgctttgcgcccagccccatggccttgtatgggctgagccgccccaggggctgggctcacgcccccccaccaagctgataccctgaccaagtgctgagttgggctggcggtggggacagctggccccccgccgggaacatgggacggtggctgggaacgtcccaagcacgtagaagccaccgtcccctggcccctgagtctccttcagccaccagcccttcctgtggccctcggctccccctgtgccccctgggccctcacccctacccgagtcccagcggcacctcggggaaccaaggtgtggctccaggaggagcagataccctgtgagctggaggaagcagaggccgggagaaggaccaattgcaatggagggcagtctaaccccagaaacccgcgcttgggcgccccttcctcctagggactgagtggaggggaaactgaggctggctgagttggagagattcaaactcagggcaagggtgggaggcggtggtcaccctcccccccacttaaccctcgccccctcggtgccactgggagatttccgctgtgcgggggacagggagggtctcggtcgccgggaaaggagttatttttagagggcgctttgctgtctcctctgccgcaaaggccgagacccgaggcgctgggtatgggggggttcgggggcaggtgttggaggggggttcgccacgtgtcctggttaattataaccgggcgtctcgggtgtcctcgggcctcgcctccttacaagggcagccacggggccctgggtggccgctcccacctcccggggaagggggctgggcagcgacgccgttcagagcgcgggcgccagactcgcgcagatctgggcagagcaagcgctctcggcgcctcggctgtgagcaaggacttccagggctgagaggggggttctgtggaggagagtacagtatagaggaagccgctttctcctcctgggacgcgccaggattgcaggctgatcgggtctcctcctccagggagctcccaggattgcgacgaagaaaagaatgtcccttccctctgagttcctccctatcccagggtctcctgggtctccttcacatcttcttaggcaggtgaggactggcttagagaaagggagcctctgtgcctctccctcagactcctgatctgaggggggaggggagaggggtgctttagaaatatttacatggggcccagccctttcccagcaagctcagattgccgagggtctccttcacggttacggaaactgaggcccagaaaaccaaatggaactggtctcgaaacagggatctatcaggcacttcctgaggctacaacaaaacacaaaacccccgccgtcctggaggtgatagtgcaagagggtcacagatgaggggacggcacagcagcaggggaggtcgaggcaggcctctttgggaagatgacatctgagcagagacctgaaggagaacagggagccagccatgtgcggctctggggggaacagcaggtgcaaaggcgctgaggtgagaatggctgggcacatctgaggacagacaggaaggaggccaggggactggagcagatggggccaaggagagagtgggaggaagaagatgaggttggaggggagacaggagcagacccatggtgccctaggggctgtgggaggagttttaatcccattgtgattgacagtgaaaatgttagatgggccgggcacagtggctcaggcccgtaatcccagcactttgggaggcagaggcggaggcgggtggatcacttgaggccaggagttcaagaccagcctggccaacatggtgaaaccccatctctactaaaagtacaaaaattagcctggcatggtgacacacgcctgtaatcccagctagccaggaggctgaggcataagaattgcttgaacctaggaggtggaggttgcagtgagctgagatggcaccattgccctccagcctgagtgacagagcaagactcagtctcacaaaaaaaaaaaaaaagaaaagaaaagaaaaagaaaatgttaaatgaaccaggtatagaaagacaaacatcacaagttatttgtgggatctaaaaatcaaaacaaggaggctgaggcaggaggattgcttgaacccaggcagtcgaggctgcagtgagctgtgatcgagccactgctgcactccatcctgggcaagagagtgagaccctgtctcacacacacaaaaattaattaaaataactaaaggagtataattggattgtttgtaatataaaggataaatgcttgagaagatggataccccattctccacgatgt[141 bp omitted]agaaaccctgtctctactaaaaatacaaaattagccggggtggtggcacatgcctgtaatcccagctactcggtaggctgaggcaggagaatcgcttgaactcgggaggcagaggtttctgcgggccgaaatcgcgccattgcactctagcctgggcaaaaagagtgaaactccatctcaaaaaaaaaaaaaaaaaaaagaacaaaacgtttcatataccccataaatatacacacctactaaatacctacaaaaaattttttagaataattttttaaaatattaaatggaaaaaatcatcatcatcatcccactgtgagactgacaggaggcactgagggtcataagcagggaagaggctggatccatgccacacgcattttgggtggcacggtccagccacaccttgtgggagggtttgtttttttttttttttttttgagatggagtcttgctctatcaccaggcaggagtgcaatggtgcgatgtcagctcactgcaacctccgcctcccaggttcaagcgattctcctgcctcagcctcccgagtagctgggactacaggcatgggccaccacgctctgctaacttttatatttttagtagagaaggggttttgccatgttggccaggctagtctcagactcctacctcaggtgatccacccacctcggcctcccagagtgctgggattacaggcgtgaggcaccctgccgggcccattgcacattctttttagccacacagtgccagaagccttttctatgttcggggattccccactgtaagccctcctcctttggagaagccaaagatgccagaaactcaatttcccagaatcccttgcagcaatggtccaggccagtgacctgggctgagccaatcaaacgctccagcaggaccttgtgccgtgagctccctctgctttgagtcttaaagaaacagttggccttggggagctttacaaccctcatcacgtatcttcatcccaccccccagagcccgactgtcaatccgacctctgcccctccactgcccactctagctcaagaccgcctccactgtccctcctgacccaacttcctccctggactcctgtcccagtctttgccattcccacctaaaccctacctgctgacctcccctcctcagagcttgccatggctccccagtgccctcaaggtaaatgagtatttgttgactaaataaataatagtaactgtatctggcagatgtaggcgagagtaaccactacccagcttaaatagaaaggactctgctattggctgggcgcagtggctcacgcctgtaatcccagcactttgagaggccgaggcgggcggatcacgaggttaggagatcgagactatcctggctaacacggtgaaaccctgtctctactacaaaaatatacaaaaaaaaaaaaattagccgtgcgtggtggcaggcgcatgtcgtcccagctactccggggcctgaggcaggagaatggtgtgaacccgggaggcggagttgcagtgagccgagatcgcaccactgcacttcagcctgggcgacagagcgagactccatctcaaaaaaaaaaaaaaaaaaaaggactgtactatcatgtattaggcactgacaaaatcgttggaagggctgaaggaacactgctcgggccccagaactactttcctactttccctctggaaaatctagtctttagctttccagcctcttcattgacaggagaatgtgctcgaaggaggttaacatggacattaaacagccactccacaaagaagcttttgtttgtttgtttgtttgtttagacatgggttcttgatggggtctcgctatgttgctcaggctggagcacagtagttattcacaggcacaatcagagtgcactgcagcctccaattccaagcctcaagcaatcctcccgcttcagcctcccgagtagctgggactacaggcgcgcaccaccactccaggccctgacagttaacttttattgaatacacctgtatgtcaagtactgtgctaagtgctttacatatgttgacttatttaacgtccccaacaataaggctcagagaggttaagtgacttgcccaaagtcacacagctggaagggggcagaactgggaatcaaacaggtacaaggctgccaagaatggattcaggctttggtggaaataacttccaggcttctccccgacgtcagactgtattgtcagcctctttctaggtcatcaggctctagtgtacccacttccccaacccatctcccatcaccccagccatctgacttcagggtccaaggactttaatgggtattcactagtttaattttccaacagtcctatgaagtgagtactgccaatttttttttaatttacttttcttctgggagtctagaaggtactgccgtttttacaaatcaggaaagtaaggctggcccagagaggttgcaacacttatcgaaagtcacacagcagggaagtagcagaacaagactggactaggctgtcagtcctggagcttgtcttcctaatctcttcctgatccccacttcttcatgtcgaacccccttttcacagaggacgaacgctggggccgaaaagggcaagggagttacctaaggtcacagccagtataactggaattacagtctacactcttctccctccattcccaaggcagccctgccctcaaaccctgtcttactcttaagcatctcatctgtctctgtccctaccctcaggaagaggctgccacctccaggagagactctgggagggcagcactccacccccatggcccaccaccctgtaatgccctcccccatgcactcctcaaatccctttcccaaaccgggccatttacgatgccatttgattcatagaagacaagttgtaaatcaaggccagacccagggctggggagttgagaccctgcccattcctcctttctcttcctggagagccaggccagcctgcagccccataatcagctgaccagggtctggtccatagggtagtgggtggtgaataaaataacgtctttcatggctcccaacttgtcctgccccagtctctccaaatcaatcaatctttttttttttctttgagagggagtctcgctctgtcacccaggctggagtgcactgattcgatctcggctcactgcaacctctgctttccgggttcaagccgttatcctgcctcagcctcctgagtggctgggattccagctgccatccaccagccttggctaatttttgtatttttagtagagacagggtttcaccatgttggccaggctggtttccaactcctgacctcaaatgatctgccctccttggcatcccaaagtgctaggattacaggcaggagccactgcgcctggcctaatttttgtatttttaatagagatggggtttcaccatgttggccaggctagtcttcaactcctgacctcaagtgatccgcccgtctcagcctcccaaagtgctgggattacaggcatgagccactgcacccagccccagatcaatcaattttatcaaattagctatacatttccctctaggtgctgctttaggtttatcccaggttgttttttgttttgttttgtttttttcttgatgttgtttgtttgtttagagacaggatctcactgtctcccaggctggaatgcagtggtatgatcttggctcattgcagcctccatctcctgagctcagcgatcctcccacctcagcctcctcagtagctgggatcacagatgtgtgccaccatgcccagctaatttttgtatcttttgtaaagacacagtcttgctatgttgcccagcctggtcttgaactcctgacctcaagcaatcctcctgcctcagcctcacaaagtgctgggattgcaggtgtaagccaccatacctggcgtgttttttttttttttttttg[132 bp omitted]caccacatccagctaaattttttgtgtgtttttcgtagagacagcgtttcactgtgttagcctggatggtcttgatctcctgacctcgtgatccacctgcctcagcctcgcaaagtgcttggattacaggcgtgagccaccggcccggcccatacctggcctgtttttatattctattatcatttcaaatgtatttttattggaactgttatatttggagtgtatggatgttcacacttattcatattttattttctcaaatttactcttttttttttttttttttttttgagatcgagtttcgctcttgttgcccaggctggagtgcaatggcggatctcggctcaccgcaacctctgcctcccaggttcaagcgattctcctgcctcagcctcccgagtagctgggattataggcatgtgccaccatgcctggctaatttttgtattattagtagagacaggatttcaccacgttggccaggctggtctcaaactcctgacttcttgatcctcctgcctcggcctcccaaagtactgggattacaggcgtgagccactgcgcccggccaaatttactgtttttattgaggcataatttattttctttccttccttccttccttccttccttccttccttccttccttcctccctctcttcctctcttcctccctccctccttttttttttttgagacggagtctcaccctgtcacccaggctggagtgcaatggcgtgatctcggctcactgcaacctctgcctcccgggttcaagcgattctcctgcttcagccttcagagtagctgggactacaggtgcgcgccaccacacctggctcattttttgtatctttagtagaaacggggtttcaccatgttggccaggctggtcgaactcctgacctcgtgatctgcccacccaggcctcccaaagtgctgggattacaggtgtgagccaccatgcccggcctattgaggcataatttctatttggtgaagtgccctaatcttaaaatcaatgaacttttatattcgtgtacatgtgaataagcatcaccaggatctaaacagagactactaccagctcccaaagaaactctctcatgtcccctcccagtgaatgtctctctctcctccaagaaaatgttctcgctgagcgcagtgggaggcct[135 bp omitted]gaggcaggagaatctcttgaacccgggagatagaggttgcagtgagccgatatagtgccactgtactccagtctgggcaacaacagtgaaattccatctcaaagaaaagaagaaggccgggccaccctctgcctcctgggttcaagcgattctcctgcctc[134 bp omitted]gcctgaaaagtgctgggattataggcaggagtgaccgcgcccggcccatttgtctaatttcttttgctcaactttttttctcttcggattcctttttttctttctttttttctttttgtacagatggggtgggtcttgctatgttgcccaggctggtcttgaactctcagcctcaagtgagcctgcagcctccaattccagggctccaggcttagcctcccaaagcgctggtgtggcagagaatagggaattagggtaactgggggttcatcaggtacagccagtttgcataagcaacagaatagcaggtgcagtcagttcatggaggcaggagagccacaggtgcatacaggctctattctccctcccatgataataagccactccagcctctgattgactgcgagccaggtctccacttgggctctgattggtcatgagccaacccttcatagagtgtaaccaattggaggcctctgaagggcacctaggggtgttgccgggtcctttttagcttaataaaaaccctaactggcaggcctggcgcggtggttcgcctgtaatcccagcactttgggaggtcaaggcggccaaatcactcaagatcaggaatttcggaccagcctggccaacatggtgaaatcccgtctctactaaaagtacaataattagccgggtgtggtggcgcatccgtggtggctcgtgctaggagtcccagctactcaggaggctgaggtaggagaatcgcttgaacgcgggaggtagaggttgcagtgagctgagatcatgtcactgcactccagcctggtcaacagagcgagactacgtctcaaaaaaaaaacaaagacaaccctaattggggaggtgctccagcccgctcccactctgtgaattgtcttggataaatctctgctttgtcttctgttgcttcgttctttttttcctttttctttttattgaaacagactaccccaaaatgcaataactttttgtttgtttgtttgcttttgagacggagtctcgctctgtcacccaggctggagtgcagtggcgcaatctcggctcactgcaagctccgcctcgtgggttcacgccattctcctgcctc[224 bp omitted]cccaggctggagtgcagtggtgcgatcttggcgcactgcaatttccacctcccaggttcaagcgtttctctttcctcagcctccggagtagctgggttacaggtgtgtaccaccacacccagctaatttttttttcttgaaattttaaaatctctcaaaaacttatacaggtgaattttgatcgtcatgatgggcttattggtaggatttttggtaacaagcacgggcaccaggacctccaaactttttggactcagagcgacggggatcagctaccagcagggtctggtcatactggatgaggatgtctttgatctccttggaagactcatccgcatatttctggtactaggccaccagggctctggagatggactgacagcataaatctaggccccttcacatggacatggatgtccacaccagcaaatcgctccttgccgggaccgagaaagagaactggctccagcagcttgtatcgtagtgtgcgcagcttgatcatctccaggagccgcccattcaccttgatgaggccatcgccgtgtttgcagtgcaccacagctgtggctgttttcttgccaccgaagacctgcacagattgcagctggccctcggaccgcatggctgcgagcgtgaactagagaccctcaccacgtggtgctgcaatcagaaaaaaaaaaaagctaatttttttttttttttttttttgagagggagtttcgcccttgttgcccaggccggagtgcaatggcgtgatctcggcttactgcaacctccgcctccccggttcaagtgattctccagcctc[134 bp omitted]cggtctcccaaagtgccaggattacaggcgtgagccactgcgcctggccattttatttttatttttatttttttacattttatttttggttcatggttttttacattttattttggtacaattttattttggagacaggttcttacctcttgccccactctttttcacccaagctggaatacagtggtgccatcatagctcactgcaaccttgacctctggggatcccacctcaatctcccaagcagctgcaactacaggtgtgcgccaccacacttggctcattttaacttttttttttttttgtggagatggggatcttgctatattgcccaggctggtctcaaactcctggtctcaagcaatcctcctgccttggcctctcaaagtgctgggattacaggtgtgagccaccatgcctggtcaatagctctaaaatggatgtggggttggctgacagttggccaatccaggccgggctcagatgggaagttctgcttcatatgggaaccttgtggagtgcaggctgaggggagaggaagctctcaggggaagcccgtctcatggtgatgctgagatgcaaaaagaaatgttcaaggtctcttgaggcctaagctcagaactgacacgactgtcacttgtgcccctctgctattggccaaagcaagtcacatggccacaccaaaagttcaaggcccatcattttgtcgtcctccacaggtaaggattatatcaggtgtgcttttcttaaatgggtccacacactcgtacatccacacacgatcatattcatggaatatctctggaagtatattggaaacggtcatcaggtttgcttgcgggaagggtgtccggggatcagggagagagaacgcttactttcactctgtagtcttttattctctgtgtctatgaacgttttttctgactgcattccctttttttttttttttttttttttttgagatggagtctcactctttcgcccaggctggagggcagtggtgctatcttggctcactggaacctctgcctcccgggttcaagcaattctcctgcctcagcctcccgagtagctgggactactagcacgtgccaccatgcccggctaattttttgtgtgccttttttttttttttttttttttgagacggggtcttgctctgtcccccaggctggagtgcagtggcgcgatctcggctcactgcaatctctgccttctgggttcatgccattctcctgcctcagcctcccgagtagctggggctacaggcgccagccactgcacccagctaattttttgtattttt[145 bp omitted]tggccgggctggtctcaaactcctgacctcaagtgatccacctgccttggcctcccaaagtgctgggatgacaggcgtgagccaccactcctggccattattttttaaattaaaaaattatggccagaaggtgaaaatagaaaagctcccatcctatgtacccattttcctgacgtggcaaactaaggccttaagggatagggtggagtatttgttggatatgcaagcaatttctcctctctgagcctcagtttccttttttatttattttttgagacaggctgtcactctgtcacccaggctggagtgcagtggtatgataatagctcactgcaggctcagactcctgggctcaagcaatccccctgcttcagcctcctgagttgctgagaccacgtgtgacacatcacacatggctaattttttttttaattttttttggcaggtgggtgacgcctgtaattccagcactttgggaggccaaggcaggcagatcatttaaggtcaggagttggagaccagcctaaccaacatggtgaaaccctgtctatactaaaaatacacaaaaattagccgggggtggtggcgcatgtctgtagtcccagctactcaggaggctgcggcaggagaattgcttaaacccaggaggcggaggttgcagtgagctgatatcgtgccactgcattccagcctgggcgacagagcaagactccatctcaaaaaaataaacaggctgggcccggtggctcacgcccataatcccagcagtttggggggctgaggtgggcagatcacttgaggtcaggagtttgagaccagcctggccaacatggtgaaaccccatgtctactaaaaatacaaaaaaattagccaggtgtggttcctgtaatcctagctactcaggtggctgaggcaggagaattgctttagcccagggcacggaggttacagtgagccaagatcacgccactgcactccagcctgggcgacagagtaagactctatctcaaaaaaaataaataaataaatttttttttgtagagataggttcatcctatgttccccaagttggtctcaaactcctaggctccagcaatcctcctgaagccctgggattacaggtatgagtcaccacatccggccagtttcctcatttttaggtggggctggtaatagtgcctaccttggggggtcagctacaaagattctggggctctgctactccttggctgtgtgacctaagacaagttactcagcctctctgtgcctcatctttttcacctgtggaatggagcgaatcatcgcagctggtgtgaagattaacaatttgtatataggagttggcacagggccagtctggggtaagaactcaaacatcagccattgttggcgttgtgcaa[221 bp omitted]gaggcaggagaattgtatgaacctgggaggcggaagttgtagtgagccgagattgtgccactgcactccagccggggagaaagagcatgactccgtctcaaaaaaacaaaaacaacaacagcagcaacaaaagcaagaaaggttttccttagttaacactttcttcttctttcaatctttatctcatttaagtctcacctcaatgctgtgtgatgagtgtgatcatccccattttactagacgaggagacagaggctcagccagagatcattgttcccccggtttacatggaacagaaatggcagggccaggatttaaacctagatctgcctggctccccgcccggctccatcccctgccctcccccaacacacatagtatttaccgggtgctaccctgttctaagccttttctgggggattatacagtaatcctcaccacagccttaaagtagggtaccctgtgagtctcgtttgacagactagaaatctgaggtccagagaggttacttcttggctcagagggtcacacagctagcaaatgacccagctgagatttgtccctgctggcctggctccagtccctgcactgcctgtggtaagcgtgtagcagatccagatccaatgtccagcgtcgtgaggccaaaaaaatggggggcagggggaaggctctgctgcccctcgatcctgtgctgttgaaatagctggagctagcactttggaaggccgaggcgggtagatcacctgaggtcaggagttcgagaccagcctggccaacatggcgaaaccctgtctatactaaaaatataaaaattacctgggcgtgatggtgcacacctgtaatcccagctactctggaggctgaggcaggagaatcatttgaacccgggagatggaggtttcagtgagccgagatcatgccattgcactccagcctgggcaacagagacactgtctttttttttttttttttaggggatggagttttgctcttgttgcccaggctggagtgcaatgacgccatcttggctcactgcaacctccgcctccctggttcaagtgattctcctgtcttagcctcctgacaagctggaattacaggcccatgccaccaagcccggctaatttttgtaattttagtagagacacggtttcatcatattggtcaggctggtctcgccctcctgatctcaggtgatccgccctcctgatctcaggtgatccgccctcctaggcctcccaaagtgctgggattataggcatgagccaccactcccagtgagatgctgtcttaattaaaaaaaggaagaaagaaagaaatagctggagcttggcacagtggctcatgcctgtaatcccaggactttgggaggccaaggcaggaggatcgcttgaggtcaggagttcaaaaccagcctgggcaatatagggagacccccatctttacaaaaaacaacaaaaagtagctgggtatggtggtgcatttgtagtcccagctacctgggacttgggaggctgaggagggagcattgcttaaacccgggaaatcaaggctgcagtgagttacgactgccactgcactccagcctgggtgacagagtgacacctgtcttttaaaaaagctagagtaggccgggcatggtggctgacgcctataatcccagcactctgggaggccgaagtgggtggatcacctgaggtcaagagttcaagaccagcctggccaacatgggaaactccatttctacaaaaatataaaaattagcaaggcatgatggtgggtgcctgtaatcccagctgcttgggaggctggggcgggagaatcgcttgaacctgggaagcggaggttacacaatgagccaagatcgtgccactgcactccagcctgggcaacagagcaagactgtcttaaaaaaaaaaaaatgctggagtagttaggatatgagtttgaatttttatttccatgattcaatcagcacctattctcccaaatgccttctctgcgttgggcctgtgctaggtggcactggggacacagtggagactgacatggcccctggccgcctcctcccttcttggggctcatagtctaatatgggactgacctgtctccccacactgatgacccagagttggcagggctggatgtgggagcccaagagcctggaaacctgggaaataagaaagggcttcctggaggaggaagcatcagcactggggctcagacaacagggaagtagagggcacgttggctgcaattcggagggagcgcggagctgtgccgagtctggagtttggtccacggaccagcagcgccctctgctggaagcatttcatagtgtagtgaccggggtaccgcgcgcattgagccatgtatgtatgtatgcatttatttatttttgagatggagtttcgctcttgttgcccaggcaggagtgtaatggtgtgatctcggctcactgcaacctctgcctctggggttcaagcgattcgcctgcctcagcctcccaagtagctgggattacaggcgtgcgctaccacacccggctaattttgtatttttagtagagatagggtttca[131 bp omitted]ctttggccagcttactattctaggacttgattccttcattcagtcacaatttattgagcaccgactttgcatcaagctcttgctgaagataacagtgctgacaatatacagccctgccctcagagcttatatagtagaggagaaaaagtgaacccataatatacagtcagtagcgagtatttactaagtactttctatttgcgaggccctgataaaagtactgtcctggccaggcgcggtggctcacgcctgtaattccagcactttgggaggtcgaggtgggcagatcacctaaggtcaggagttcgagatcagcctggctaacatggggaaaccccgtctctactaaaaatggaaaaattagctgggcatggtggcgggcgcctgtaatcccagctactcgggaggctgagacaggagaatgacttgaacccaggagttgcagtgagccaagataagatagcgccattgtactccagcctgggtaacacagcgagactgtgtctcaaaaaaaaaaaaaaaaaaaaaaaagtactgtccctgtattagttaacattcaattctcaaagccttagactatttatattttattgactagggaaactgaggcacagagaggttaagttacttgcccaaggcctgcacagcaagtaagtgccggaatcaaatttgaaccctgagcccaattcttagatatcacattcccttgccaataacataatatataacataacataatgatgtgatatatgttatataaaataactttaggggccgggggcggtggctcactcctgtaatcccagaactttgggaggccgaggcgggaggatcacttgaggtcaggagtttgagaccagcctggccgacatggcgaaaccccgtctctactagaaatataaaaagtagccgggcgtggtggcagacacttgtagtcgcagctactcgggagactgagatgggagaatcgcttgaacttgggaggtggaggttgcagtgagccgagatcgcgctactgcactccagcctgggtgacggagcgagactccctctcaataaataaataaggtaattttaggccctgaaaagttttgtgaacaaaatcaagaggagtatgtaatgttttggtggaagggtgccatttagaagggggcaatcagggaaggcctgccggaggaggtggcctttgagaagagacctaaagacgatgagatctgtgggaagagagatcgaagcaggccacacaaccaaggaaaaggctctggggcaggcactgcaagaaagccacctgtctgggatctaaagtttccaaagttttagcttggccaaggcccctgcgctacaatcaccctgattcgaggtgtcctggaggttaccagttccgcgtgcgaagttctgccattcccgcggggctggagccccgaggctgaacttcccacgggcggtgggcgtggccggctcacctgcgggggcgtggctcccggctgccccgcccctcggaggagccgcccgaggtcccagacgcccggcgcagcgggagcggcggggcgtgcctggcctgcgggacgcgactgatcgcagtggggcgaagcggggccggagccgcccgcggtcaggtgggtgccgggagtggggcgcgggactctcggagagccgcgatgatggggggcgggggcaaccctgggcccgctcgccctgagacggggaagggccttggggctcccggatgccccctgccccgtcctggggctctccgggatctggaggcctggctggggtcccatgccccccaccccagcgcaggtaaacagcgaggacggggcggggcctgggagggagagggagggggcccttgtgactgcgggtgagcctggtgcgcggggctgggcaggccagggtaagttggtgcggcttgcggggctgggccacgatgggagtctcctgcctgcctgtgtttgtgtgtgtgtgtgtgtgtgtgtgtgtggctttgcgtgtgtgtaagagagtgtgtcaggctgtgggtatgagggtgaaagcgactgtccgtgtaaccctgtgatgggactgtgtgtatgatgtgacacttttagcaatgtgaaaacgtgggcgacctctgactggaatggtgtgtgtgtagaattggattgctggtagcactttacgaccaagagctagtgcgactgtagtcgactttctgcttggcctgatgtgcatgtgtgtggctgtgtgtgtggctgtcttcatggcagagagtggaactggttgtaggattaggtgtgattgaccaagaggctgtgcggctgtggttgtctttctgcctgttggtgtgtgtgtgtgtgtgtgtgtgtgcgcgcgcgcgtgtggtggacagtgtggcactggatcagtgataggtgactatgattgacttttgattgtgtgtcactgtgatggtgcatggggctgggcggaactgtgtccagaagtggagctgtttcatgggacggtgcgcgtggaaccttggggttggatgagtgaggtgtggaggtgtgtgaagccgtgtgtgcgtgtgtgtgtgtgtgtgtgtgtgtgtagagaggaactagagggtgtgtgatctgcattgataccgtggctggcagtggtgtgcaacggagagtttgtgggagatgggagtggagacgtggacatttaagtgggatgctcctccaagcgggtgacaggatggaaaagggggtccgcgtcagggatcagtgtgtgggactgtgcctatgattatcagctgtgcggttgtgcacccggggctctgtgtgagtgtgggagctgctgtgtgtctgggacacagcccgagtgctggatggctgtggttgagccgtgtttgttgctgtggttgtcaatctggctgtggagtggtgtgtgtaaggctgtgtctgaggttatagagggaggttttacatcggcaaaattgtgtgaagaatggttgtggttgtcaggatgactcttgaacctgtgtggttgtgagttcaaccatttatgatgtttgtgtgtgaggtgtgagaataggtatggtgtgatatacacaagcacacagattggccgggtgcagtggctcatacctgtaatctcaacactttgggaggctgaggcggcggggattgcttgaacccaggaatcctagactagcctgggcaatatggtgataccccgtctctacaaaaacaaaaattagctg[134 bp omitted]gccaacatggtgaaaccccgtctgtactaaaaatacaaaaattagccaggtgtggtggcgggcacctgtaattccagctacttgggagggtgagggaggagaatcgcttgaacctggggaggtggagatcgcagtgagccaacatcatgccattgcactccagtctgggcaacagagcgagactcagtctcaaaaaaataaaattaaattttttaaaggttgatatatacatcacatatatacacatacatatatctagagagagggagagatcaatgacgatcaagtctgtggtgcacaaaacgtacaggacccttactgtatgtgatcgtgcatgtacaacatgtgcaaaaaccgctgggctgcttatggtggatgcagtggcttgagtgaagtgtgcgagaacgtggcatccctccacgcgtattcacagctctctgttccgacagtggagctgaatctgagtacttgtgtgtgcatggcgtgtaggtgtgggagtccctgctggccaggcctggagtgggagggagaggaagtagggaaactggcgagggatccatagtgaatcttgggagtgtgtgcatctggaggtgcgttgggcacattgtggggagttggctgcttgggagccatgtgagttcgggggacagcgagtgtcacggtcaagtgcaaggagatggtctgaatgtgagtgatttggggagtgggagagacagagttagtttctgcgtgggttggcttttctttcttttttttaaataatattatcactttttgacacggagttttgctcttgtcacccaggctggagtgtggtggcgtgatcttggctcactgcaacctccgcctctcaggttcaagcaattctcatgcctcagcctcatgagtagctggggactacaggcgcataccaccatgcctggctaattttgtatttttagtagagccggggtttca[144 bp omitted]gtatacagattgtttttgaaagaatagtatatgtgtgtgcctgagtcagtgtgttgtcttaggttgtatttctaaaaggaaaatgtaaatgtttttactgagttgtatatttaataggagaaagtgagtgcgtgttctaagaggagaatgtatattatgctgtcctttctttctttcttttttgactgggtcttactctttcacccaggctgagtgcagtggcactatcatggctcactgcagcttcaacctcctgggttcaagcaatccttctacctcagcctccaggtacaccatcaccacacccagctaatttttttatttttatttttgtagggatggggtctcactatgtttcccaggctggtcttgaactcctgggctcaagtgatcctcctgcctcagccaaaatcccaaagtgctcggagtacaggtgtgagccaccgcacccggcctacattgtgtttctaatgagggagtgtgtgtgtgtgtgtgtgtgtgtaactgtatttctgggagggtgtgtgtgtgtaccgtcttttttttttttttttttaaatgaagtctcactctgttgcccaggctggattgcagtggtgcgaccttggctcactgcaacctccgcctcccgggttcaagcaattctcctgcctcagcctcccaagtagctgggactacaggcatgcgccaccatgctctgctatttttttttttttttttccagtagagacagggtttcaccctgttggccaggctggtcttgaactcttggcctcaagtgatttacccaccttggcctcccaaagtgctggcattacaggcgtgagccactacacctggccccatgttgtattggagagaagggagagtgcgtgtgtgtgtcaaattgtatttcggagaggaaaatgtgtatgttgcattgtgtctttaagaagggagggtgcgggtgtgtgaggtgtttctgaggagtgtgtttgtgtgtatatgaggaccccagaggcaccaccagctaagtttctgtgaccttgtcacccacatacaaccacatgaagtcccatagaggggggcccccacccactatgagctgggcttcagactctcagctgtcacatggccagtgtgacatacctggaccacacctatcacacgtgtgtcccgacaggccctgggctggctaagcttgtccgatggaggagggcggagcccctgttcccccagggtccatctgttgcctgggagccaacacatggccccatcctcattccccccaacctagaggcctcctgggcttctgggggccctggcccctcggccctctcctcccaccccacccacccccagtggtctgactggttcccgacaaaaacaccctaagaatgagctcacgcagaggctgccgcctccacacgccccgcctcactctgccggcagaggagggtgcctctggtcccaggtcacacggccaaccgggagctctgggccaggggatccaagggccttggggtggggaaggctggccaggtgagctgagggcagatgggggaccccaggctagctgtttgctttctcttggttaattacacataggatttgggaactgtcctcagggcagaaccctgggttgggaggacagacgaaggtagacaagactgttccagatgagagctggctgggatgggtgtggagactgggatggagagggtgtggaggcagagggctggccaggatgggtggagcagggaagagccaggatggggagaagttaggggtcctgatggccattatgggaatagaggctgggggccaactgactggcccgggcaatgattccccaaacccctcaccattgctccccaggagcagcaatgtctgtgcaggtagcggctcctggaagtgcagggctgggcccagagcgcctgagccctgaggagctggtgcggcagacgcggcaagtggtccaggggctggaggcgctgcgggcagagcaccatggcctggctgggcacctggcggaggccctggcgggacagggcccggcagccggcttggagatgctggaggaaaagcagcaggtggtgagccactcgctggaggccatcgagctggggctgggcgaggcccaggtatgagggggccaggtggggagctgggggaaggtcagctgagggcggagggagggccaggcatgagggggacaggtatgtaggggactgggagagggttcactattgcagaggggcacactttgggaggctgaggtgggcagatcacttgaggtcaggagttcaagaccagcctggccaacatgggaaaaccccatctctactaaaaatacaaaaagtagctgggcatgagggctcctgtaatcccggctactcaggaggctgaggcatgagaatcgcttgaacctgggaggcggaggttgcagtgagtggagatcgtgccattccactccagtctgggtgacagagagagactgtcccaaaaaacaacagaaaaaagtatggcagagaggcacatccggggcagggggaggcctaggggaaccaggcctgggaaggggaggctccaggtcagagatggagtcccttggcagctttagggggtccttgtgtgtgacagggacccctgaaccagatggcattcttcagtaaactgtgggtcctagggcaagtttgggggtaaaatcagaggggcccctgggagcctctgagggcactggggccatgttggcagagtctctgcagaatctgggggtgtcgtgcatagtagtggggtgctacggcctgactcgaggcctgggctgggtcaggggccgtctggcagggcaggaaccaacctcgacttgggacccccaccccgggcaggtgctgctggccctgtcggcacatgtgggtgcactggaggcagagaagcagcggctgcgctcgcaggcccggcggctggcccaggagaacgtgtggctgcgggaggaactggaggagacgcagcggcggcttcgggccagcgaggagtccgtggcccagctggaggaggagaagcgccacctggagttcctggggcagctgcgacagtacgacccaccggcggagagccaggtgccacgggcagggcgaggcggggggtgctgggcccttcatagagccccacagtcccccagaccctccttagaatcccacagtccccaagatcctccttagaatcccacagtcccccagaccctccttagaatgccacagtcccccaaccctccacagagcccccagacccaccagaacttccacagacgcccccactagctactccacgaagcccccgagcctcgccagacccccagggggcctctgacgctcgtgaccaccacctccctcaaaccttgagataggctgggtgcggtggctcacgcctgtaatcccaacactttgggaggccgaggcgagcagatcacctgaggtccggatttcaagaccagcatgaccaacatggagaaaccccgtctctactaaaaatacaaaattagccgggtgtggtggcacatgcctgtaatcccagctactccggaagctgaggcaggagaatggcttgaacccaggaggtggaggttgctgtgagccaagatcgcaccattgcactccagcctgtgcaacaagcgaaactccgtctcaaaaaaaaaaaaaaaacaaaaaaacaaaaacctgagatagagccagggccccggtctctgaaacaagcccccaccaccccggccccccactttcctgtctctgcagcagtctgagtccccgcctcgccgagacagcctggcctccctgttccccagcgaggaggaggagaggaaaggtgggtgttgggagtacatgccacagaggatggcaggccagggtggggagggggctctgagctgcaggaccccaaaatctctgagccaggggatggggaggtgagggcagggtgaggaggaccctgaatgtgacagtgcaggtgaggctgggagccacaaagacagggtagccgctatgagcctggcaggccccgtattcacatcccacagggcaggtgggctgccgtgttcctgtcccgaggccaggatgcatcccaccagctggttagatgctagtgactcctatctcagaagttagcgtgggggcccatagtcccaggggccagttaggcagtccggcagttctgaggcacgtgtcccctcatgcgaggctggaggggcaggaggcttgcagtgacccagagcccaccccaccccacctaggtcctgaggccgcaggagcagcagctgctcagcagggtggctatgagatccctgcccgccttcggaccctgcataacctcgtgatccagtacgcggggcagggccgctatgaggtggcggtgcctctgtgccgccaggccttggaggacctggagcgcagctcgggccactgccaccctgacgtggccaccatgctcaacatcctggcgctggtgtaccggtgagcactgcggccagccatggctgggggcaggaacggcagggacccattgggtgcaagtggaaggatcctggtgccccctctgtcaccatggagcacctagggaggtcaggggaggggacagcaagaatgggaaaggaagggaaggctcctgctgtgagaacggcaaagagggagtgggacagggatctgggggggccactgagccaggcagagaggagtcagagagcacggacaccagggaccccaacagagcaggcaggagacctggggtggctagaagcttggcagaggtctgggggtacagggcccagtgttagagaattgcgaaatatggaggggcccacaaaaggccctcaaagggtgtgccacccatgcttggttcagccaggttccctgggcctgtcaggattggcccagcccctgtggctgcagctgccccaacccttggctaaccccctccattcctggggcgccccccacagggaccagaacaagtacaaagaagccacagaccttctccatgatgccctgcagatccgggagcagacgctgggccctgagcaccccgcggtgagtggggccccagggagacgaagtggggtcaaagtggggccacacctgcccatccctgacctgtgcctcccccaaccccgcaggtggccgccacgctcaacaacttggctgtcctctatgggaagcgtgggcgttaccgggaggcagagcccctgtgccagcgcgctttggagatccgagagaaggtcccatccccctcaccccaccccgaggaaccccttgtcccatgtagccctccccagggatgctgagcacgtacatcgtgaccctgaccctcgggccccttgcgtttggtattgggagaccccagttggagcctagatcacccaacccatcacccttgaccttctgagatcccagtttggtcttgaccctgactgacctctcgccttacctcacacatcaccctccaactgggtccccccatagcctttccaacccctcatggccaccagcacaagcccaaccctgacctacccatctcaccctgtgccccacgtttctggaccaccatgacctctgaccttggtaatcccgttagatggtataacttgtgtccccagcccccaacctctcaggtcactctctgctttgaccctgtaatccccaactcatgaccaccatacagcagtgatgtcacgtgtcccaccaatcctgtatgatccctctgacttgtgacccctggcccccaggtcctgggtgctgaccacccagatgtggccaagcagctcaacaacctggccctgctgtgccagaaccagggcaagtttgaggacgtggagcggcactatgcccgggccctgagcatctatgaggcactgggcgggccccatgaccccaacgtggccaagaccaagaacaacctggtgaggcccctggggctcagagtgggccaagagtggagggtcctgccctggggaggcacccattggttggatacagggtgagcaacgtgagggtgggggggggccccccaggccgggcccttggagcaagtgtcagacacaggagctggctcagcacagaacacggaatcaggaaacgcgtaagtccacggcagccagaggacagccagtgaagcggaagctggcaggcacaggtggcagcagcagacatttattgagctcactgtggccggctcccctcttagcccggtccccacatcgctagttcttatagcgtccctatgaggtgggagctgtcgctccactttgcgtgtgggaagactgaggcaccgaggccatgccaccagcccaaagtacagcagacaggctcagaaacaggaggctgcctgtcctccatccccagggcaggaagtaaggccgagctccaaacccactctgccccagggcaaggctttaggcaggggaaggatacggccaggtcagcacattagaaagtggggccagacgtggtggttcacgcttgtaaccccaacactttgggaggccaaggcaggaggatcacttgaggctaggagttcaagaccagcctgggcaacataccaagacccctgtctctacaaaaaaaaaaaaaaaggcgggactggatgcagtgttgggaactggggtccgaaaagttcccagacactcccttctccgcaggcctcagcctacctgaaacagaacaagtatcaacaagcggaagagctgtacaaagaaatcctccacaaggaggacctacccgcccctctcggtgagcccctagcccctgtctgtcttccctcctggtggcttctctatgtccccatctcagtgtcccccatctttccccctaggtgcccccaacacaggcacagctggtgacgcagaacaggtgaggatgggctgtgcttcggctcctggggtgggcgtggggactgcatgggcctgggggactgagcagcatccccggcccctccccaggcccttcgccgcagcagctcactctccaagatccgtgagtctatcaggcgaggaagtgagaagctggtctcccggctccgaggcgaggcggcggcaggagcagccgggtgagtgttgatcaggtcggcaaagagccctgacatcagcagaatccacagcccaccccacccccacccccatcttgctcaagaaccttccatggctcccatctcccctgtgatacacacagatcaaaccctgtgctggaaaggtccctcgtggaggggggccactcctggattcactcatttcctccctgctgccctctttgcagaatgaagagagccatgtcactcaacacactgaacgtggatgctccaagggctcctgggactcaggtgagggggacatctgggtcaaaaatagaggaggccatgtgggtaggtgcagagatgaggcaaaggcagggcggtcgggccagtggtggagtcagcaggtggtgggttggtgtcagaagagacccaggacaggagcaaagatgggttttacttggggtagaggcgagggggttggatagttggctgccaggctggacctggagctggagggtggatgtaacacttgcccctcacctcccctccaaccatcccctgtgcctgtctccagtttcccagctggcacctggacaaggcccctcggaccctcagcgccagcacccaggacctgagcccccactaacgtccagtgaactgcgctggccgcagcttcttgggaacagtgcaggagggatgggctggtggggtgagagggggtctatcatctcctggcccccccttgcctctgggtacctggtggatagctgccttctcctgcgattaaaggctgtggacgtgacagtgagaaatgtcacctgacttcataagaccttctagcaccaccgccgctgggaaccagggccaggcaagactcaggagtcaccaggaaccgtttatggccccacccgccccactcagagctgctgagcaatctgctctatcctcttcagcgtctcctctgattctagctgctccaggctgagcagggacaggcccagctgatcctcctgcagagaacagaggaaagggagaggggggcactgttgggcaggggcccaggcagctgctgcacttccccaaccacccccccgaatggccagtagggacaggatgtttgaatgaatttggagatgtccgtataatccagagcgggccatccctgtcaacataagatggggctgagggaggagccagctagggagtcggagaaggaccggctttctccaggccagcaccgtctctcctgaaaacgcccaatgcctcctcaccccaacttctctcaccctgccgtgcctgggccacctgctggcatctgtggcccctcgaatctcccccttccccccagagcctggcacgtagatgcacgataaacttctctttgctgagggcaggaggacaggcaggctgagggtggggagtggggagaatccaaggggactttctggaggagaagctcagcctgggagggtgccgggagggggacgcaggcctcacccggtggaagggctgtgccatctgccgcaggaagtacttggccacctggacaccctcgtccacggtcaggttgaggttggcatctgtgaggtgctcctggatccagcggggcagcttcccccgcttgtccccacgggcaaaccgctgtgggcagaagcgcaggccagggacagaaggtcattcggggagcctgggccactctccaccctgcaacccaccccacctgggaaatgaacgggaaacagcctggttcttggagcctgggatgggagcacaggggcacccctgaagctgcaccttgtcggcaaagaccatgaggccgtagtccgtcttgcccctgatggcccgacccacacactgggccgcgtggcgcatggcatcgaaggtaagaaagtcattctcacgaatctggaactggtcccgcaggtattccagccgcgcctgcagatacggaggatgagaagctggggaggtgggggagccactcctcccttgatcctaacactgtgggactccctgggagacagagctactcaccttgagaatgcggctctgtgtgtagacgtaggggacgccaaacatgatgacggcccgcccgtagtggtgcactggtgggcagaggagagggggcgaggggggttacaagtgtggctggtgggacagggacagcctcacgcgacccaggatgctgtgtctgagttggggggagagggtgtgttcccgccgggtgcctagggacagaggggaggggagggcccctctgtgcacctaggctgggggtgggtggttccccgcgggagcagacagcagagcgggcaggtgttccagagagctctgggaagacacctggggaggaagagcccagtccactcaccaaagtcgattccctcggacactttgccccgggccactgacagcaggatggccccgcggccattctcgcaggcctgaggtggggagaccgagacgcaagttaggtcactcctcagagccacctccccgacccctctccacgctggcctcgcacacccacctcctggtacttctccagggcgacactggtttcggcaccatcctgggtctcaataaagagcagcttgttcctctggatgttctcaaggatcccctggggaaggacccagggaggtcagggtgggttcagggcacagccatcctggttacatccaactcttctggggactcccacatcaccatgtctctgggcctcagctggctcatctgagatgtggtgagggagggtggaattgtccaacctcagttctttggggaaacagtgatctgggtggggaaccaatcattgctggataagtggggcaggcatgtggcccaagcgggtggccaatcagggcaccccaacccctgccagcgattggtggaggggctgactgtgaggcaggcagagccaatcagaggctgccctgagacttcccatatgacactacaatagagacagtgtggagccaatgcaaggacagaccactgggacagaatggagagtccagaaacacacagccacctgtgcagttcagtggggagagcttttactggagcaagtggattttcaaatggaaccaaaaaatgaaccttgaccccctacttcacaccacatagaaagatgaatttgaggtacctcatagacctggatgtgaaagctaaaaccacaagctcctagaaggaaacaaaggagcctctctctatgaccttggggtaggcaaaggtgtcttaagtaggacacaaaaggcacctgcgctgtggggactgggtcacctttcccgccgcgtggaagccgcctattgaagcacaaggccgatgtcctggctgtgaggatgacgttcccgcctcccatgcgtgcctttccaatacctggattagccaagttcactcacctcaccccaaagtgctttcacccactcctgagagcccggccatggtgtgctcagaggcacaaagtgcagagtggcctcccctcccacccatgtcctgctggtcacccagggcctggctgtggtgagccctgtttccagaatgccccacgacctcctctagctgcttccctgaaggggctcctgcagacccttgagaggctcgccccgagtcttggtccagccttaattctctagaattcctctaacccagctagagccacgcctgctatctgggcctccccaccaggccatctgtgctggaggataacagggatgggtaaccccaaaagcagcagagaagcaaggaacctagaacgtgggggtgactctgccacagggtactcctctgagggaggggcccacattggggcttatatctgcattctcagcctgatgtactgggggcggggcatgggggtgtgtgctgcttacaccccattcctacatgctgcacacactctcctgtcacacaggaaacctgtcaccatcagagtgtgagaggaatgaagctgacatagcggtgcagtgccagggactgaggagagcaggtgcagggagggggtggccaggcgtacctgctcataccaggaggccacggtgctctccatgtactggtagctggtgaagaaggccacgatgccatcagggaccacagcggacatctccagcaggaggttcccatagttccggatcacagctgcaaggggtcagaggttgggccctctcctggcccaggtcctcctcccttctctgtcttagaactaggagtttctggaaaccccactgaggctgcctgtcaggcttttcacacatatccccctcctcctcctcccgggcgtgtctgaggacccgccttgccacttcctgaagtcacacctggc[152 bp omitted]ctctactaaaaatacaaaaattagcccagcgtggcggcagaggcctgtaatcccagctactcgggaggctgaggcatgagaatcgcttgaacccgcaaggcagagactgcagtgagccgagatcatgccactgcactccagcctaggcaacagagcaagactctgtctcaaaaaaaggccatgtgtcacttccaggggagcacccttaggaaccagtgcacaatacactgtgaccactgtgatcccacctgtcacattatgctgcctctgacacacccagcggtggaggttcccaggtgaggagacacagggcaggcccctaccagctcacagtggacgtgtaccacgggcaagaaggaaactctgggctgagcaactaaggccagggatatttgttacagcagcatgactcagcccacctgactgatacacctcccctcttggaacccacagaaaccagccccactggcagcataccaatatcctcccgggtctcaaatttggagctgatggccacctggtcattgccacggccgatgatctggagagcaacagaggtcacgataagcgaggcagcagcaactgctccagcgtgagtgctgaccacctgctggtgctgttctaagctttttttttttttttttttaaagagagacagggtgtcaccatgttgcccaggctgatcttgaacacctggcctcaagtgaccatcccgccttggcctcccagagtgctgggattacaagcatgagccaccacacccagtctgctctaaactttttataaacacagtgtcattgaatgaaccctcagcaaccctgttatctgcattgcacaaatgacctgggctcagagaaggtgagttgcctgcccaaggtcacacagcaaacaggtggcaaagatggaaccggacccgagtctgtccacactctccaacagcagctacactctagccagccccaggccctgggccagccggatcccgaagaacacccctcgccatgccggcgggcatcccaccagccggcaacctcacacaaccaccatgcagtgggggtcattaccggtccacaacctctgacaggcaactccaaaagccaaaagctctgaacacatttctttttcaagtttggcacaaactcatgaagcagcaaaacctgccctgccccgagtctctccagaggcctgacttactccttagtgtgatgcttcccaatcttttactgccgaaatgggagtttgactcgggggagctgcccagaccccactgtgggcatcacacaccacacagcataggccttgtctctaaaggctggaaaattctgaattccaaaacaaatggctgcgcgcagtggcttacacctgtaatcccagcacttcgggaggaccaggcgggcggatcacttgaggtcaggagtttcagaccagcctggccaacgtggtgaaaccccgtctctactaaaattacaaaaattagctgggcatcgtggcacatgcctgtaccagctactcaggaggctgaagcatcagaatcacctgaatccaggaggcggaggttgcagtgagctgagatccgtgccactgcactccagcctgggcaacagagcaagactccgtcgcacaacaaaaacaaaaaaccacatccagcctggggacttcagataagggactgagggctcatgttgacatgcacgtgttacagagacggagacggagaggaaggctcacttacctgggtcacagccagaccacgtactcggcaagatgctaagatgctgactaagcgcctacctgtgccaggccctgggcgacctaagtggtttaccccagttctctctctcaatcctctcaaccaccctgggagatcagggaggatacattcccatttcacagatgagaaaactgaggcttgagagtcgagcccacagagaagcagaatcaagcctaagtctgtctgaatcccgaacccagcctcttcgctgtaaagctctcctgcctgagcagtgggggaagccaaggaaggagggcggccccttgcccccatctcccctcccggccccagccctagcctctcccactcaccatagggcagaggcagacccgtgccagcgtcatggtgaaggttgccatggtgacggggtggaagtccaggatcttggggtagatgtccagcggggacagtgtctgtggcgggacagtgggagggatctcagcaggactgggcagggaccaggaggcccatggagggaggtcagggactaggaggggacggggaagggtccttaccccagatgtgatgatgacagactggaaacgctcaaatacgggtttgatggccagcgaggcgtccatgcagctggagagagatgagggcagtgagggcccggggggctgggcccccgacccacagagcattcacaccctcaccgggcagggtcccacctgaagtgcaggatggggttggcaatggtcggggttctgtcgtcaaagggctcgatgatgatggtgaagcctgcagagggcaggcaaggaggggtgagattaccccactacagccacagctgcacccactcagtcattccctctcctgctccctcgcttcaccccaatctccaccccgtactgcctgggagtaaatgcgaccaaacatgactgcttaagccccaaaccaggcatctgagtccaaaatacaccccaacctgtccgcttcgggcccacacctgtgcaaactttcacgaaggatcccaagtagagagcccacagccccgcccactgctcactctcccagcaccgcatgggctgcccagcacccacgccaaagccaggagccagagcctcaagctttctcccatgaccttttcttgtttttgttttttgagatggagcctcgcgctgtcgcccaggctagagtgcagtggcatgatctcggctcactgcaagctcagcctcctgggttcaagtgattgattctcctgcctcagcctcttgagtagctgggattatagggacacccccctacaacacacccagctaatttctacatttttagtagagatgggggacctgcagtggtccacccgcctcaggctcccaaagtgccaggattacaagtatgagccactgcacctggcctcccacgacctttctacctaagccatcagcaaagccgggcagctctgcctccaaaacctacctgcaattcgcccactgcccccgaccccacgcggggccagccaccatcacctcctgcctggacccatcatcccctgctcgcttcacggcagccagagggaccctagggaaacctgagtccctgagtccagccatgtcacctccccgccccaagaagcctcccatggcccccacatgcctccagtggcctggtgcctgaccttcaaaaatcagcaggctcagtccccccagggcctttatacttgctggtcccatgtggcctggaaaacctcccaaggctgctccatttggtcatctgagactgctcaaaagtcagcccctccgagaggccctccccagccaccttttctacgcagacatattccaacacaacaatgtattttttttcatgataactgtcactttctggaattatttccttgtttatttggctgcatctttgctactggttttcccatctggaatataagttctggggggttagggatgagatcttttttggttcctgctgcttccacagtgctgagcctggcctgtttgttgaagaaataaatgaatgaatgaatttacatattcggtttcacacagtgaaaaaaaatcaagtcctctgtgctggggacacagtggtgaccaagccagccttgcccctgctcgcatgggttcgcagtccagtaggagacagacttgtcctcagatagtgatgactgagagtgggcagtgctgggacagaggtgcccagaggaggggcctgactcagcctgggggtcagggagggcttcctggaggacaagacatctctactaagctgagaacctaaggatgagggggaggtggttgggggatgaggaagatgaggaaggatgatccaggtgaaagaccatgaggtgttggcagatgggaaatagtgggtagagaatgacaaaggtagggatggaagatggggcaggacagagagacagaggcagaagcagcagccagccggcctcgctacccagccccagggcaagggcccagatctccatcctcctgtcaggccctgccgcaggacatgaggcccgatctggtttcctgggtacaggagaaacccccaggaggcagactgagcccctggtcagcttcacgctgaggatggggagggaacaccggcccataaagcctccagaatgatgtccctctctcgtaacctgaaaatctgaacatcagcctctactcctcttgtccctggtcccaaaacccaggcaccacgctccccatatcccagcctctctacctcccacatctctctccaaaccatacctttctctctccccatggccacatcctggccaaggcccctcccctcctgctcaggtccctgcctgccacccagtctcctgcctctagtccctgccagaagaactctttttttttttttgagacagactctcattttcacccaggctggagtgcagctggtgtgatctcggctcactgcaacctccgcctcccgggttcaagcaattctcctgtctc[134 bp omitted]cagcctcccaaagtgctgggattacagacatgag[132 bp omitted]tgcctcagcctcctgagcagctgggactacaggcgcccgccaccacgcccagctaactttttttgtatttttagtagagacggagtttcaccatgttagccaggatggtcttgatctcctgacctcgagatccgcccgcctcggcctcccaaagtactgggattacaggcgtaaaccaccacgcccggccttttttttttttttgagacgaagtcttgctctgttgcccaggctggagtgcagtgccacaatcttggctcactgtaacctctgcctcctgggctcaagcaattctcctgcctcagcctctcaagtagctgggattacaggagcccaccatcacacctggcaaattgttgtatttttagtagagacagggtttcaccatgttggtcaggctggtctcaaactcctgacctcaagtgatctgcccacctcggccccccaaactgctgggattatgggcgtgagccaccatgtctggccccagctaatttttgtatttttagtaaagatggggtttcgccatgttcaccaggccagtctcgaactcctgacctcaggtcatctgcctgcctaaccattccaaagtgctgggattacaggcatgagccactgc[143 bp omitted]aaccccacctctactaaaaatacaaaaattagctgggtatagtggcatgcgcctgtagtcccagatactcgggaggctgaggcaggagaattgcttgaacccaggaggcagaggctgcagtgagccaagatcacaccactgcactccagcctggcaacagagcaagactccgtctcaaaaaaaaaaaaaaaagcacaaatctgacctggcaccttgcttgctagaatctgccatggctccccagtgccctcaggagcacaaagatcaactcattaccgtgccctctagtgtgagctgaccccatagaatttctctggcctcctcccttaccactgcccatgccatccttctccactctgcagcccgaggaagtctgtgaaaatgtaaatctgagcacaaggcttactcaagaactatgtatggctccccactgccttcaaaatagggcccacacttccaagccaaaccccacaaagccctgtgtgtcctgccaacaaccctctagaccctgctgggaccctgattccagctgctaggaggcccagcagggacagaaaaaggtgagcttacctttggcgtaggtgctgacaagggtggcaaagttagcaaggagggtgagcggggagaagtcagcaaggtcggtgatctccagagtatgcagcagggaccggaggcgttcagcacagaatctggcggggaggagagacggggtcggggggcagacggaagcatgagcaggaccagcagccctgcctccgccatcacgacggtcacgtgcctgtctccccagccaatgagcactcagtgagggtgggcactgggcctgttttggaaacttgcacccccacgctgtacacctgcatgtcacaaatagccattgccgcataatggcacagacagagcaataatcagacactccagagtcatgtggtcacttgtcacacctgctagcacgacctcctaagtgggttctttttttctttttcttttttttctttgttcagatggagtcttgccctgtcatccaggctggagagcactggtaccatctcgactccgcctcctgggttcaaatgattctcctgcctcagcctcccaagtagctgggattacaggtgcctgccaccacactcagctaatttttgtacttttagtagagacggactttcactatgttggccaggctggtcttgaacttctgacctcgtgatccacctgcctcagcctcccaaagtgctgggatgacaggtgtgagccactgcacctggccctaagtgggttctgatcaaaacaagagacgcacaatcacacccagaaccccccagtcatggcattaatcccgcatggccacatggtcacgcattcacacccagagcctctcccactgcctctcacgcacctatggggacacacacggtgtcggaaccccatgggctcacagaggaatgcagtcaacacccacatcccacagagtcccacggataccacgtccacacactcacgcatgtgcagggccactcggccacaaccacacacaggcagggccgaggcagggtcatagagcagctggctttgaagccaggtgggcagtcacacttgcaaacctgcctcccgcacgtcagccctcccagcctggctcctctaaccccaggcgcctaccccggctggtcgctagctgaggatgagtctgtcccctccactgggccatggagcctctacggctgtgtccccagcatgaagcaggcacttggggaatgtgtgttgagtgactgagatcccctctttgccctcacaagtctccaatcctggggaagatgggcaaacccacatggaaggtggcctcacccacagaggcagggcagccagggcctttggagcccacaggcatggcttcaagccccaactaccgggcacagtgctgtgtggctctgggcaaaggcttcccctctgggagtcccagtgtcctcatttgcagggtggggatgctgtactgggggtgcaactgaggtaaggaacataaagggcttagctcctccttagtgctcagggcagggtaggtgattggcttcgctgctctctcattaacccaccaaagaaccctgtgaagtaaagacccgactccttggccattttacaaaggaggaaactgcagttcaaagaagacccatgacttacccaaaggaaaagccccctcgtatcccttggtcattctctgcctgccctgtgcctcaagagactgactcccccaaaatgcgcccagactactccatggggacgcccctgccctcaggtttggaagattagaggcatcggtgggaagatacatgggccggggacacctcctccagctcccagcctgcgaggccctggtactggtttctgctcccagcagaagcccctgtccaggcccccaccagttggttctcaacacactccctccctgccgctgtggcctggcttagctcccagctctcacctcccaccctccttggctcctcccccagcccgcccctctgtaaatggtgctcccactctctcttgggtgggggagattctccaatccagccaggtgttgcctgccaggcccctgcccgacgcacggacccaggatcagctccaaccttgctcccggacctcccaggtcagaccagacaaggtcccacgtgcctcgcccagctcactcactcctgatgctgcagtggtgacctggggctacaggcgtggaggacacggctctgcataaccgggacctgccgggcccccaccccgcgcgctgtctggggccgcacctgaggggcttgcgctggatgcacacgcgctgggccaggccgctcaggaaggcgggcgggctctcctgcaccacatgctgcacacgcagccgccacttcacgtactccagcagccgcctcaggaagcccaggaaatgctcggccgtgcggatggagccaggcactgcctctgcgaggagacgctatcagcggcgacggggaggcgggaaagggactggggggcagcggggggtcggggctcaccctgcagcacttcgtcgggcagcacggggttggccaggtgggcgtccgtctcccgggcggcgctggcctcccgcagcccctccaccagacgccggtactcgtcccgcaggcgctgctcgtctgtctctttgatcctgcggagagatgagctggggctgggagggggctggcaaccctggggacaagtcagacaggggccagggtcccaggggcagggcgggcaccaccgccagacgtccccggccccacctgagcaccgtcttctgcagggtctccaggttgccctggcaccggtcaagggtccggcgggtgaggttgacgctcatggagtcgatgcagacgttgtctggagaagggggagagagccggctcaggcaggcctgcaggggcctcactcagaggggctggcatccctttggcccctggcgcccccctcaccaatgttgtgggcctcgtcgaagaccacgacggccttgcgggccagttccttggacaccaggtctgcaatcttggggtccaggaggtagtggtagctataaaccaccacattggcatgcaggatctggggggccggggagcagggttaccagggccctgccaccccaacccctacccctacccctggccacactggcccgtcactcccacacaggcctgcacaggcagacacaggccaggcagaagtatgagcagatggatagagacagaccaacagatacgggcacccaccaacagggagatgcagacaggcagactcacagcaagcaacagacagacatgggcagacaggagacgggcgggcagcccacaccctcacactcgcccctctgcccatcccaccagcctcctcactgagtatcgagcaaggaagtatgggcaccagccctggcgccgccccagggccttcaggtcatccaggttgtagatgccagcggggaggggcacctcacgcccatgggcatcaaattcctgggacaagagtgccaggggtcagggaggctgcctgccccaggctacctgtcctgcctccctccctcagccctgccctccagtaacctcatagaatcggcagtggggcaggctggtgtcatgctggtactgcgcccgcacataggaggctgtgaggctgtggcatttcccatcgacgtccttcccaaagcgcaggggtgtcacctgggggtgtggggcatcttagcacccagacagggtggaaacccaaccactcttcaaaccctggtctccacacctcccagctggctggggttttggacaacttgaacctcagtctgttgcattattagttaaga[133 bp omitted]ccaacatggtgaaaccctgtctccactaaaaatacattagccaggcgtggtggcacatgcctgtaatcccagttactcgggaggctgaggcaggagaatcgcttgtatccgggaggtggaggttgcagtgagcagagatcgtgccatagcactccagcctgggcgacagagtgagacaccatctcaaaaaaataagtaaaaataaaaatacaaaaatgagccaggtgtggtggtgcacacctggaatcccagctactcgggaggctgaggcaggagaatcccttgaacccagaaggcagaggttgcagtgagccgagatcatgccactgtactccaccctgggccacggagccagactccctctcaaaaaaaaaaagagtagcaaaattgttacattcttacaactacaagttatacatacatatttttggagacaagtccctctgctactcaggctggaatgcagtggcccaatcacggctcactacatccttgacctcccaggctcaagtgatccttcccccactcagcctcccgagtagctgcggccacaggtgtgcaccaccatgcccggctaatttttgtcttcttagttgagatgaggtcttgctatgttgcccaggctggtctcaaactcctggtctcaagcaatcctcccacctcagcctcccaaagtgctgggattacaggctgagccactgcgcccagccagccaaaactaatattttattttttgagacggagtcttgctctgttgcccaggctggagtgcaatggcacgatcttggctcaccacaacctccgcctcccaggttcaagcgattctcctgtctcagcctcccgagtagctgggattacagacatgtgccaccacacccggctaattttgtctttttagtaga[139 bp omitted]gcctgaaaaatctttagcatataggttgaagataactacttcatccttggaaatgccaaaacgcatggaaccttggcagggcctaagaatcaaaggaggttccacacagtctgggactccccttacccctgacctgctctgtaccctctaaggcaccatcacagcctaaggctttttctgaagaacaaatccttttcctacgccaaaaggaaagctccaaggcagccagcccttccttctccatttcccctttcatcagtcaccgaggcctgtgctctttgtcatccactagatgtattatttctcacatattcttacaaataatgtgatataatatatagtctgtgggcccagtgtgggagtttgagaccagcccggccaacatgatgaaaccccatctctactaaaaatacaaaaaactagcagggcgtggtggtgggtgcctgtaatcccagctactcaggaagctgaggcagaagaatcacttgaacctcggaggtggaggttgtggtgaaccgagatcacgccactgcactccagcctgggcaacaagagtgaaactccatttcaaaaataataataataaataaggctgggcacgatggctcatgcctgtaatcccagcactttgggaggctgaggcgggaggatcacaaggtcgggagttagagaccagcctaaccaacatggtgaaacaccgtctctactaaaaacacacaaattagccgggtgtagtggggcacctgtaatcctagctactcaggaggctgaggcaggagaattgcttgaacccgggaggcggagcttgtagtaagccaagatcactcccctgcactccaggctgggtgacagagtgagactccgtctcaaaaacaaaacaaaacaaaaatatatatatatatacacacacacacacacacacacacacacacacatataaaaacatatatacacacacatatatatgtaagtataatatatacacatatatacattctgtgggttaccacatgtaaagtattcagaacagtgcctggcacacagtgagtacaatttttttttttttttgagacggagtttcactcttgttgcccaggctggagtgcagtggcgcgatctcggctcactgcaacctccccctcgggagttcgagcaattctcctgtctcagcctcccaagtagctgggattacaggcatgtgcccagctaatttttcaattttttttcagtagagac[135 bp omitted]ttaatgataactaatattgtatttgtcatatatcattatgcatataaatatcatgacaatttctttttttttttttttaagacagagtctcactctgtcacccaggctggaatgcagtggcatgacctcagctcactgcaacctctgcctcctgggtacaagcgattggcattaccgacgtgtacaccaccacccccggctaatttttgtatttttagtagaaatggggtttcgccgtgttggccaggatggtctcgaactcctgacctcaaatgatctgcccacctcagactcccaaagtgctgggactacaagcgtgaaccactgcacctggcctatcatgagaatttctaacattcttttagctctttgtacatgctaagggcatcggctgcaacatttcacccaattttatcatcagcaaccttatgaagcaggtacataattatccccattttacagaaaggaagactgaggcccaggtggcagaaaatgcctctccataaatactgggctagtaagtttcagagccaggaaaccaggcttgccagagactctaagagctgcctttttaacctctcctaggcctgggtagaatttgaagactccctggaggaagtgtgcttgcctgggccacgatgaatgagaatttgaccactgagacgggaattctgtgtgtagccactgcatgcctttgcaagagatatggcctggggatccaggacttgtggttggacgaaagagttttctctacctctgggctaagggcaaggagaaggaacaggtgctcacctcagggtgaatacacaagtttttgcgggagctcagagccagtcccagaaacggcagcttctcgccctcctgcttctcatagaagttgagcaactttcgaagctcttcaatcacctactccaaagttggggggcagggggagcttgtgctcattggaggcacaaacccctgccctgccaggtcccagtctcttccccagcttcccaaacacccccgaaagctggtgacggccaccgccagggggaccaatagggcctagggaacagtggggctggagcaccaggatgagtcccagcttaccttctcaatctctggcacagttcttgagcagtagatgagtttggtcacctccagcggatatgcctgccgataacaagcggactcagtccctgtcccgccccttcctttgtctgcctttacgggttcagcgcatcactcactctctggtatgccatgatcagggccaacagggatactgtcttcccggtgcctgagggcatctccaggactccatgaccctgcatgttggggaccagaggggcaacacacagggtctcagaaccttgggcacacaaactctggggactctccccgacccccaatgccaccaactcagaacagcaggataacacagcagcagttaagattgggcagtgggtttgaacctcacttctgcctcctccttgttgagtggtcttaggcaagtaccttcacctccccagacctcagtatccctatctctaaaatgagcctaaagccaggcgtggtggctcacacctgtaatcccagcactttgggaggctga[134 bp omitted]aataaaataaaatgggcctaataataaaaccttcctcataacatgactatgaggattgtgagaaattgcaggttaaatatttggcacagtagctgatatatagtgaacttttctcccttcttttttaagagacaagtgtcactattgcccaggctggaatgcagtggcacaatcatggctcactgcagcctccaactcctggcctcaagcgatcctcctgcctcagcctcccgagtaggtgggattacaggcgcccgccaccacacctggctaatttttgtatttttagtacagacggggtttcaccgtgttggccaggctggtctccaactcctgacctcaagtgatccgcccgcctcgtcctcccaaagctctgggattacaggcgcgagccaccgcgcccagcctattcaccattattgttttagataacggaagattatggggtcctggattcccagggacctcggacttctaaaatccagacgtcctgcaatctgtcttaggcccaggcgtggcagccccaccggtcgagtgggcgggtcgggcccaccggccacccaccttggcgtccagcgtgcgtttgagctcccgcatgtaggagaactgctcggggtagatgtagtcgtacgggaagtagaccaggagcccgtccacgttgagcctggcggcaggggctgctgggtcagttcccgtcccctcagcccctctcccgcctccacagtgcccggtcgtcgagcccagagaagggtgacgggcccggcgcccccggtaaccctcaggtcctcaggagcctcggggccccctcagtgtctcctcgctatcactgctgctccctgcggctgcccccgtcccaccccttcaccctcccctcgcccccttggggacccaggcgcgcccaccgatgaccccatcttcaagaccccccgcgcccgctagcgagcgcgacccccagcccccttctcacttcatggcgccggccggactgtgcagcggggtcgacccgcctccctcatgaatattcagcgagaggccgggtcgtggacatcctcgagggctcgctccacctatattacgagaccattggctaacctgcccgtcaatccgctagggcagagccaatcgggatactgcgcgtgcgcacggaaaagcgagggcggctgactctcgggtgaggcggtgcgggaggcgtcactgaggatcgtcgagggccaatcaaaaagaaaacatggaagggaaagagccgagagactcgatctcattcactagaatttggtcctcctgcgcctgccaagattgtctgagtattgatcgaacccaggagttcgagatcagcttgagcaagatagcgagaacccccgcccctccacctcgtctcaaaaaaaaaaaaaaatcgtctcagtagcgaatagtctaacggagaatgacagggaaattggtgatcctttctgggcccaagagttagaaatggctttgcaggccgggcgcggtggctcaagcctgtaatcccagcactttgggaggctgaggcaggtggatcacctgaggtcgggagttcaagaccagcctgaccaacatggagaaaacctgtctctactaaagatacaaaattagccgggcgtgctggcaaatgcttgtaatcccagctactcgggaggctgaagcaggagaattgcttgaacctgggaggcagaggttgcagtgagcagagatggcgccgtcgcactctagcctgggcaacaaaagcgaaactccatttcaaatattaataataataactaataaataaaacataaatgctagcttttgtttgtttcttcaacaaatagctatgtggcatctaccatgtgtctgatcctgtgctggcccctgggaacagaaaggtgaccatgacagcctcagcacctgccctcaaagaacagatttttttccttgagacagggtctttctctgtcgccaaggctggagtgcagtggcacagtcacagctcactgcagcctccacctcttgggctcaagcgatcctcccacctcagcttccagagtagctgggaccacaggtgtgcaccaccaagcccagctaagttttattttttaaatttttttagagacgaggtctcaccacgttgcccaggctggttaaactcgcaggttcaagtgatcctctcccctcagcctttcaaattgttgggattacaggggtgaggcaccaggcctggcctcaaagaacagatattaaatatacaaatgaatatatgattacagcctggagtggtggctcgtgcctgtggttccaacactttggaaggccaaggcgagtacattgcttgagctcaggagctagagaccagcctgggcaacatggtgaaaacccgtctctacaaaaaatgcaaaaattagctgggcgtggtggcgtgcacctgtagtcccagatactcaggaggctgaggtgggagaatcacctgggcctgggaggcagaggttgcaatgggcagtgattgtgccactgcactccagcctgggcaacaggagtgaaaacctatctcaaatgtgtgtgtgtgtgtgtgtgtgtgtgtgtgtgcgcacgtgtataatcacaagtacaaaagtgctgtgaaggaaaacttcaagtcaccataaagattgattatgggctgggtgcagtggctcatgcctgtaatcccagcactttgggaggccaaggcagatggatcacgaggtcaggagttcaagaccagcctggtcaacatggtgaaaccctatctctactaaaaaaaaaaaaaaaaaaaaaaaagccaggcatagtggcatgcatctgtaatcccatctactcgggaggctaaagcaggagaattgcttgaacccaggaggcagaagtgagccaagatcacgccactgcactccagcctgcgtgacagagcaagactccgtcccagaaaaagaaaaaaaaaaaagacttattatgacaggatgtctactgtcaactgtggggtgtgagtgttggccaagtgatcagagaaggcttcgtggaagaagcgaggtttgagtagagccagaaaataattagaagagatcaaccagcaagaggggatggatgagagaagtgagaaaggtgttccagggagagagaccatcatacacaaaagctctaggccagaagaaagctgaggcctgtgagtgctgaaaggaagcctgtgggggtggagctctgagttgagcacagggagcagagaaagggcagctggaggggaaggcaggggcagatcgaaatctcttttttaaattaattaattcttaatttatttatttttgagacaaggtctcactctttcgcccagactggagtacagtggcacaatctcagcgcaccgcaacctctgccacccaggctcaagcaattctctggcctcagcctccctagtagctgggattacaggtgcgcaccactactgcccagctaatttttatacttttagtagaaacggggtttcactatgttggccaggctggcctcaaactcctgacctcaaaagatccacccacttcagcctcccaaagtgctgggattacaggtgtgagccacccttcccggctgtatttttggagacagagtcttgctctgtcccagcctggagtatggtggtgtgaatttggctcattgccaccttgacctccagggctcaagtgatcctcccacctcagcctcctgagtagctgggactgcgggtacacgacaccacgcctggttaattttttttaattttttgtagagacgagggtatctcactatgttgtccaggctggttgaactcctgagctcaagcaattctcccacctcagcctcccaaagtggtgggattacagacgtgagccactgtgcccggcttaatttatttacataaatttttttatgtttacttttctatctcctacaggaagaaaatatattttgttattgacagggtctcgctatgttgcccaggctggtattgggctcaagccatcctgttccctcagcctcccaaagtactgggattacaagcgtgagcctctgcatccagcccagatccaaaatctttactgtcacctacagagtcctctgtaactagcttactgctcatcatccccataccaacccaccttactgctctgatctcctcctctctctcccccagctcattttgtttcagctatgctggtctccttgctgtctctaaaacataacaagcacatcccatctcagggcctttgcaccagctattttgtctgcctggaatgctgtttcccctgatagccatgtggctgacacactcacctccctcagctctttgctcaattgtcaacttctcggcccggcatggtggctcacacctgtaatcctaccactttgggaggctgaggtgggcagatcacctgagatcaggagttcgagaccagcctggccaagatggtgaaatcccgtctctactaaaaatacaaaaattggcaaagcatggtagcacataccagtaatcctagctacccgggaggctgaggcaggagaattgctggaacccgggaggcagaggctgcagtgagccaagatcatgccactgtactccagcctgggtgacaaagcaagactctgtctcaaaaaaaaaaaagtctccttctcaatgagggcttcctgaccaccaaattaaatctacctcctagacacacacacacacgcacgcacgcacgcacacacacacacgcacgcacgcacacacacacacacacacacactatatcccctttccctgctttattgttcttgagagctcatttaaccatgtgacatgct[134 bp omitted]cacggtgaaacctcatctctattaaaaatgcaaaaattagctgggtgtggtgtcgcatgcctgtaatcccaactactcagaaggctgaagcaggagaatcgcttgaacctgggaggcagaggttaacgctgagccgagatcgcgccattgcactccagcctgggcaacaagagtgaaactctgtctcgaaaaaaacaaaagtcagctccatggcaggagtgatggctcacgcctataatcccagcactttgtgaggccgaggcgggcggatcacttgaggtcaggagttggagaccagcctggccaacatggtgaaacctcatctctactaaaaatacaaaaattagccgggcgtggtgacacatgtctgtagtcccagctacttgggaggctgaggctggagaatggcttgaacctgggaggtagaggttgcagtaagccaagatcgcgccattgctctccatcctgggcaacagactccgtctcagaaaggaagaaagaaggaaagagagaaagagagaaagagacagagagagagagagaaagggagaaagagagaaaggatggaaggaccctgacaagcactgttgcataaaagtttcttttctctctcttttttttttttttttttttttgagacagggtctcacttctgttgctccagctgaagtgcagtggtgagaacatggctcagtgcagcctcaacttcccaggcttaagtgatcctgccacctcagcctcctgagtagctgggactgtaggtgtgcaccaccgtgcctagctaattttttgtatttttagtagagacatggttccgccacgttgcccaggctggtcttgaactcctgggcttaagggatctgcccgccatggcctcccaaagtgctgggattaccagcgtgagccactgtacccagcctgagtataggtttctgataaattttaggatcatattgtttggactgggtaagaatttccagaactctaatgaagaaactgactggtttatattttattttattttattttattatttttgagatggattttcactcttgttgcccaagctggattgcagtggcacgatcttggctcaccacaacctccgcctcccggtttcaagtgattctcctgcctcagcctccccaggagctgggattacaggcacccaccaccatgctcggctatttttttttttatttttttatttttagtagagacggggtttcaccatgttggccaggctggtctcgaactcctgacctcaggtgatccacctgccttggcctcccaaagcgctgggattacaggcatgagccactgtgcaaggcctaggctggtttataaaattgctaaaccaagcagaacatgaattaaataccaaggaaatactctcctagattgtcatgttacatcagccaatactaaaattgtcaagatacacaatttgaatgaactccatggtccaagtcgaattatctatgatattacccatctaataaacagcactatgtcccttaatgggagaaaaagttggagaatttaagagaatatcaatccaatgttggttgggtgcagtgaatcatgtctatattcccagcactttgggaggccaaggcaggaggatcacttgagcccaggaattcaaggccagcctcggcaacacggtgagatcctgtctctacggaaaattaaaaaaaaaaaaagagagagattagtgggatgtggtgcctatagtcccagctacttgggaggctgaggcgggaggatcatttaagcctgggacgttgaggttgcagtgaaccatgagtgagactcatctcaaaaaaaaaaaaaaaatggcgatcactagaggaaaaaaaaactaaagtggggtttgcgggtagtgggagggcccttcctgctaggttgcactatgatctccagggaggctccacgggagaatcatttccttgtctttttcagtttctagagccaaattctttgcataccttgcattccttggctcggaaccccttccctaaccttcaaagctggcagctagcctctggctcaagtgtcacatggcctgtctctgtcttcctatccaatcttcctcttataagaacattggagccaggcatggtggctgacgcctgtaatcccagcactttgggagaccgaggcaggcggatcacaaggtcaggagttcgagaccagcctggccaacacagtgaaaccccgtctctactaaaaaaatacaaaaaagtagccgggcatggtggcaggtgcctgtaatcccagctacttgagaggctgaggcaggagaatcgcttgaacctgggaggcagaggttgcagtgagacgagatcgtgccactgcactccagcctgggtgacaatgcaagactccatctcaaaaaaaaaaaaaaaaaaagaacactggagaccaggtttagggctcactcagatactccaggattattgtctcattttcagatcctcaaggtcagcacaactgcaacctcccttttaccatataaggtcacattcacagattatgaatttgacaaaccaaaaattggtcataaactatgttagcaatttggaaacagtcatcatagcaatatatttcatttgaatcattatctctctcatgatgaatcacggagtgcagaggtttggttttatttattatttttctttttctttttttttgagacggagtctcgctctgtcacccaggatggagtgcagtggcgcgatctcagctcactgcaacctccacctcctgggttcaagcaattctcctgcctcagcctcctgagtagctgagattacagacgcccaccaccacgcccggctaattttttgtatttttagtagagatggggtttcaccatcttggccaggctggtcttgaactcctgacctcatgatccacctgcctgggcctcccaaagtgttgggattacaggcgtgagctatggctcctg[140 bp omitted]aactccatctctactaaaaatacaaaaaattagccggacgccatggcgggagcctgtagccccagctactcgggaggctgaggcaggagaatggcatgaacccaggaggcggagcttgcagtgagccgagatagtgccaatgcagtccggcctgggcgaaacagcgagactccgtcgcaaaaaaaaaaaaataataataaataataaataaaaataaaaataaaataaaaaaataaaaataataaaataaataaaaattattttgagacaaagtctattctgtggcagaggctggaatgcagtggcgtgatcacagcttactgcagcttctacctcctgagctcaagcgatccttccaccttggcttcctgagtagctgggacctcaggtgtacattaccacgctcagctaattatttatttatttattatatttttgtgacggagtttcgctcttgttgcccgggctggagtgcaatggtgctatctcagctcactgcaacctctgcctcctggattccagtgattctcctgtctc[218 bp omitted]ttgctctgtcacccaggctggagtgcagtagcgtgatctcggtttactgcaacctccatctcccgggttcaagcgattctcctttctcagcctcccaagtagctgggactacaggtgcacaccaccacggcgggctaatttttgtatttttagtagacaccaggtttcaccatattggtcagactggtctcaaactcctgacctcaggtgatccatctgcctcagcctcccaaattgctgggattacaagcgtgagccacacacctggcttaatttttttatttttgatcgacacagggtctccctatgttgtccaagctggcagagatttttgtttgtttgtttgagagggaattttgctcttgtagcccaggctggagtacaatggtgcaatcttggctcaccacaacttccgcctcccgggtttaacagattctcctgcctcagcctcccaagtagctggaactacaggcacctaccaccacaccaggctaatttttgtgctttttagtagagatgaggtttcaccatgttggccaggctggtcttaaactcctggcctccagtgatccacccgccttgacctcccaaagtgctgaaattacaggcgtgagccaccgcgcctggcctctcaacctacaatttcaacacccaaggaaacagcccaccatgagtgagaaccagcagacacaacaaactataggattagctgcctccaaacttcaggtgatagaattatcaggcatgtacttgaaactaaaggacacaaaagaagaatccgaaatataaaataaaggattggacttgtgtgaaaagaatcccttagaaagggctactttcaggctggccatggtggctaatggcctgtaatcccagcactttggaaggccgaggtgtgtggatcacctgaggtcaagagttcaagaccagcctggccaacatggtgaaaccccgtctctactgaaaatacaaaaattagccaggtggggtggcagatgcctgtaatcccagctactcgggaggctgaggcaggagaatcgcttgaactcaggaggcagaggttgcagtgagctgagattgcgctatcgtgccccagcctgggcactagagtgagatcaaaaaaaaaaaaaaaaaaagaagaagaagaagaaagggctactttcagactgccttgccaaaaatcataaccacaatgatgagcatgtattgagtcaaaacagaatcaaaagagaagaaagtcaatttctgtgcaaactacttttatttataaggaaagtttctctattttgtttataaacattaaaccagtgctgtgtgaaggcacttaattggggagaggtggggcagggatcctggtagagaccaatgtttcccacccagaccccaagactgctgggagagatggtgtcagcagtgactcccaggaatatccagtggtgtggtggcccatcccaggcccggctgggcaggtggctggcttgctgggggatgtgatgatggtggtaggcatgggaggcactttggacgggatctgatttggcaaaaggaagtggtttcctgtccccagtgatttccagcccttcccagacctcccaaggctaaggcagattactaaatttaaggctggggccctccttcttccctggacttccaggagaacagagaaccggtggcaaggaccaccaccagcagggtgaggggtgcagataaaggcagcaaaaaacagagggagaggtctggagggaaggcaggaatgcttgtttctgtcagcctcagaaacctccttctatcctgctagactttactcctttgaggcttcaccctggggaacagctggggagagacaggatcttcagacatcaggagctcccacctcctcatcccacatgcaaatccgctgcctgtctctatcctcccaccccttcctaaggggacctctcagcacctcccaaactgctccagaatccaagttctgtgtcacctccaagaaccagatggaaccttccaatcagagcctccactgatgaaatggaatatttccagtgtctcctaactgccataaggagaagcccacctctctctaacaccttggttgtctttttgggtcccacctccatatttaaaaaatctcctctctcagggccgggagcagtgggtcacacctataatcccagcagtttgggaggccgaggtgggtggatgacctgagctcaggagttcaagacaagcctggtcaacatgacgagaccctgtctctactaaaaacacaaaaaattagctgggcgtggtggtgcatgcccgtaatcccagctacttgggaggc[132 bp omitted]gaaaaaaaaaaccaaaataaaaaaatctcccttctcaggaatgtaacggaatcttccttgccttctcccctaaccctaatagagaattttcctcagttacactgtaattttattaatggatttttcctcattctgcccaatgcagtgtaatgaaagcttcctctccatctgttatattatatataaatatatattatatatttatatattatatatttatatataacatatatttttattgtcacccaggctggagtgcagtggcaccatcagggctcactgcaggatcaatctcccaggcttaagcgattctcctgtgtcagcctcctgatgagctgggattacaggcacccgccaccacacccggctaactttttttttttgtatttttagtagagatggagtttcaccatgttggccaggctggtctagaactcctgacctcaggagatccgcccgccttggcctcccaaagtgctgggattacaggtgtgagccacctggccgggccctccacttccttcttgtacattgctgaatccctgtgtcagccctagaggtccagtcttttgccctctcccagccttaatctacaattctgtaacccacccaccatcattaaaatgagattcttctttgtcgcttcccttggctaaaatggattattctttaacctctccaccaatacaaccagggatgataataaaaacattggattgagcagaaaccaatcaaataactagtaaggcagtactggcgagcaccctacatcctgacagctttataaagggcgcttccagccaggtgcggtggcacatgcctgtaatcccaggactttgggaggctgaggcgggcaggtcacctgaggtcaggagttcaagaccagcctggccaacgtgatgaaaccctgtctacacaaaatacaaaaaaaaaaaaaaaattagccgtgcgtggtggcatgcgcctgtcatcccagctactctggaggccaaggagggaggatcacttgagcccgggaggcagaggttgcagtgagcccacatcttatcactgcactccagtctgggtgacaaagcaagactccatctcaaataaataaatacaaattggccgggtgcggtggctcatgcctgtaatcccagcactttgggagacca[134 bp omitted]ggtt[132 bp omitted]aaatttaaaaataaaataaagggcttttcctcacctactccactaactataagggacccttacccccgacattactattaaatataacggacttttcgtctcctccccatgagcaataatgagcttttcagacctccctctcccaatataacggtttgttcctgttgcctcttctttttcctgtgggatcccccttttccccaacccccaactgtcgggaggtccccatgacttctcccctgggctcaccccgaagtagttccgcggcacgtagccctcctggccgtgcagcgcggcccaccaccagtcggtctcctccggcccgtccctccgcagcacggtgaccgactcgccctcgcggaaggacagctcgtccccgaactcggcgctgtagtcccagagagcgtacactgccccgctgttcatcagccccatactctgctcgacgtctgaaacatgccacggaggggaaggtgagagcctggcccagggggtccaggaacaggggccacgtggggtccaggacagaccctggaatttggcgcctgtcccagcaaccacctgaaatgttgtgtgtgcccatggctgtggatgggaaccggagctggagtcagatgccgggactggccgtctttgagcgttcgaggaaactgggggaggcatgccagt[159 bp omitted]tgcctcagcctcccgagtagctgggactacaggcgcccgccaccacgcctggctaatttttggtatttttagtagagtcagggtttcacc[140 bp omitted]gtcgcccaggcaggagtgcaatggtgcggtctcactgcaacctccgcctccggagttcgagccattctcctgcctcagccttccaagtagctgggattacaggtgtgcgccaccatgcctggccaatttttgtatctttagtaga[154 bp omitted]cctagaggtccagtcttttgccctaccctggcgcttagcttaagtggtacagtctctaaggaagattcgcaccttccttgaatgatagggtcctttaagttggctcat[135 bp omitted]cagcctccaaagtagctgggactacaggcccacgccgctacacccggctaaattgttttatatttttaatagagacggggtttcaccgtgttgcccaggctggtttggaaatcctgagctcatgcaatccgcccgcctcgagcctcccaaagtgctaggattacaggcatgagccaccgcgcctggctttctttttcttttcttttctttttttttttcagacaaggtctcactctgccacccaggctgcgggagtgcagtggtgagatcaagcttactgcagcctcgaacttccagattcaagcaatcctcctgcctcagcctcctcctgattctttatgttattattaaatattttgtaggccgggcacagtggctcacacctataatcacagcactttgggaggccaaggca[132 bp omitted]ctcgggagcctgaggcaggagaatcgctttcaccgaggaggcagaggttgtagtgggctatggtgccattgcactccagcctgggtgacagagcaagactctgtctcaaaaaataaataaataaaaataaataaatatttcgtagaggtcaggtgtggtggctcacacctgaatcttagcactttgggaggccaaggtgggcagattgcctgagctcaagagttcgggaccagcctgggcaacactgcaaaaccccttctgtactaaaaatacaaaaaaatgagtcgggcatggtggtgagcacctgtagtcccagctactcaagaggctgaggcagagaattgcttgaatccaggaggtggaggttgcagtgagccgagattgagccactgcactccagcctgggtgacagtgagactctgtctcaaaaataataataaataaatatttgtagagacagggggtctctacaatgtcttgtagcctgaccaggctcacctttcaaatatataaccctctgtctcacccataagtcctaggacctgcctcactccaactctccgtgaagttccttgcccacaccgagatacaactggctcctccaggtgtgaaatgaccctgtgcacaatccccgtggcacagcctacttcgccctgcccgtcggggaaccaggtgatgtagcctgccccctggagagatagggtacagccttgtgtcttcctacaagcccctttctggcagctgtagcctgctcacctgccagtggtgtggcaatgcctctcccacaagtggcagagcccacctgcccagagccctatgccaggtagatggcagggttgaaacgttcagctcctcacccttgaagatgtgaaaggtgagcagaccaatcttcacagccactctcctccccaaaggtgtccagctcgcatagcacagcctccatgtccccttttcccttaggagggcatagtccccccacccccgcaagcggtccatccctcatcctcctcctcggcaatcctgccaagtggttggtacagcccccatacccttctctccctagtagggggtagttgctcccctccccgctcctgcgcacccgccaggtacccaggcgccagcagccctgcctcgcacctgccaggtaggtggcgcagtcagcataaccctcgcggtaagggtcgcacttctcgaaggcggtggcgccgtcgctgagcgtggtggcgaagattgcagcgccgtgctgcaccagcgccatgcagatgactgtgtcgttgcacgacgccgcgcagtgcaagggtgtcctaggcgtgggggtggggggttgcggggaacgatgcgtgagaggctgcgcgtccgcccacgggggacccagcccaccgcgcgggtcggggctcaccagccgtggctgtcgggggagttgacattggcacccgcggtgatgaggaaatccacgatagagtagttggcgccgcagatggcgttgtgcaaggcagtgatgccctcctcgttgggctggctcgggtcgttcatctgagtgcaccgggggagggggaagactcagtcccgcggctggcatctgcgatgcccccgccgtgcccacctcccgctcagcagcgctcacctccttcaccgcctgctgcaccacctccagctccccggtcagcgccgcgtccaggaggagcaccagagggttgaggcgcgcgcggcgggccttgcgcggggagcccgccttccgcagcacagagcgcatctcctgggggacagggcgcagaggtcagcgacttggagggattgttagtatatccatgatctagagtaggaaacagaggtccagggacttgtggcacccatctagacaggggtagaactgggattccctcgggatggggtgagggggtgccttcgatctcctcctagagcctccagttccctgccatagacagggaatcctgtgatttgagaatcttgggccctgaaacttgggagaaagctggggggccatgggattggtggcaaagtaattctatcagttcaaaacaatgattgtggaagccagttatgcaattcacacacagtctcacatttcttttgttaataatgaatgcaatgagacacacatgacaaaatgttaccaggagtgttcattccggatgtttggaatttgagcattttattattccttgtattttccttttctttttctctttttttttttttttttgagatggagtctcgctctgtcacccaggctggagtgcagtgcagtggtgtgatctcagctcactgcaccctccatcccccaggttcaagcaattctcctgcctcagcctcctgagtagctaggattacaggcatgcgccactatgcctggctaattttcatatttttagtagagacagggttttgtcatgttgtccaggctggtctcgaactcctgacctcaggtgatccacccacctcagcctcccaaagtgctaggattacaggtgtgagccactgtgcccagcctcatgggctttcttatttttaattttcctcctgtaagattcatttattctgggctgggcgaggtggctcatgtctgtaatcctagcactttgggaggctgaggtgggaggatcacttgagcccaggagttcgagaacagcttgggcaatatagtgagacccagtctctacaaaaaataaaaaattagcctgacatggtggcgcacacccgtcgtcccagctacttgggaggctgaggcaggaggattacttgaatggaagagaaggaggcttcagtgagccatgatcatgccactgcactctagcctgggcaacagagtgagacccagtctcaaaagaaaaaaaaatgcatttatttattccaagtgtgtgagtgcatagcatttgtgattctggtctttgctgtttccagagtttcagtgattttaagattctggaattcagagatcccaacagccactgaattcaaaattcccagatgctcagttatttcaagtttccaatatgttgtgattgcagaaatgctaggctgtgctatttcaaattgctgaggggccaggactttggaatccaaagattct[149 bp omitted]ctgcctcagcctgccaagtagctgggactacgggcgcccgccaccacgcctggctattttgtatttttagtaaagatggggttt[131 bp omitted]aatggctgggtgcggtggctcatgtgtgtaatctcagcactttgggaggctgaggagagtggatcacctgaggtcaggcaggagttcaagaccagcctggccaacgtggtgaaaccctgtctctactaaaaatacaaaaattaggtggccgtggtggtgcacgcctgtaatcccagctactcaggaggccgtggcatgagaatcacttgaacccaggaggcacagttatagtgagctgagatggcaccatcgcactccagcctgggtgacagagtgagactccatctcaaaaaaggaaaaaaaaaagaaagactagaaggaaatattcaaaatgttaatgatggttccctgtgagtggtgtgattttgtcctctttcttctatttttatttattttccccaagctctctatggtgttggtgtatttctctatagtggaatgtgtaaatttaaagtataaatctcagctgggcacagtggctcatgcctggtttgagaccagcctggacaacataatgagaactgtctctactgaaaatgttaaatattatctgggagtggtggtgcatgcctgtagtcccagccataggggaggctgaggcatgaggatcaattgagcccagtaggtggaggctgcagtgagccatgatcttgccactgcactccagcctgggcaacagagtgagactctgtctcgataataataaccctctattacaacatatcagtgcatgaatttgtgattttataattcaaaatatgagcatctttaattgtcagatttggtgacttcaagaatcagtaataatcagtctatgatactaactttataattattttttttaagagaagagtttccttttattttattttatttgagacagagtttctctctgttgcccaggctggagtgcagtggcgcaatctcggctcactgcagcctctgtctcctaggttcaagcaattctcctgcctgagcctcccgagtagctgggattacaggcatgcaccaccaggcccagctaatttttgtatttttagcagagacggggtttcaccatgttggcgaggctagtcttgaactcctgacctcaagtgatccacccgcctcggcctcccaaggtgctgggattacaggcatgagccaccgtgcccagcctaactttataattctaagatcgtgttcaaacctttaaatgctctagggctctaaaatgttactatcctaagacggtgacactagcgtttgattcttacattctatgattttttaagtttctctgtggccaggactctgtgattctacaatgggatgctcagccatttcaacatgttgttattcatcccctcttgatttcaaaatcctgagcctcaaggttccttgcctttactttcaggagggcctaggaataggcattttgggggggtccacctgacccctgcttctctgagaagtgatctcttcccgctgtctacgcacacggagtgttcaggactgttccatgtggctacaaccctcttcccagtcaagatgcagggaccaagatcagcaggagaccatcccctggtccaatggtgacaacagtaagagcagttaacagttatgtgccaggtattatgctaagcactacattaatgtatttaatcttggcggggtgtggtggctcacacctgtaatcccagcactttgggaggccagggcgggcagatcacttgaggtcaggagttcaagaccagcctagccaacacagtgaaaccccatctctactaaaaatacaaaaattagccaagcgtggtggcatatgcctgtaatcccagccacttgggagactgacgcaggagaatcactttaacccaggaggtggagtccagcacccagccgagactcacttgtttttatttatttatttatttatttttatttttattttttttgagacggaatcttgctctgtcacccaggctggagtgcagtggcgcgatctcagctcaccacaagctccgcctcccgggctcacgccattctcctctc[133 bp omitted]gcctcccaaaatgctgggattacaggcatgaaccaccacgcccggcctatttatttatttatttagagatggagtcttgctctgtcgcccaggctggagtgcagtggtgcagtcttggctcactgcaacctccgccttccgggtttaagcgattctcttgcctcagcctcctgagtagctgggattggaatgagaccaccacttctcctgttgtccttcccagcttctcccccacctccccttttccctagtttataagacaggaaaaaaagggagaaagcaaaacgctggaaaaaaacagaagtacgataaatagctagatgaccttggcgccaccatctggtcctggtggttaaaataataataataatattaatccctgaccaaaactactggtgttatctgtaaattccagacattgtatgagaaagcactgtaaaacgttttgttctgttagctgatgtctgtagcccccagtcacgttcctcacgcttacttgatctatcgtggccctttcacgtggaccccttagcgttgtaagcccttaaaagtgctaggaatttctttttcggggagctcggctcttaagacgctgatgctcccggccgaataaaaacctcttccttctttaatccggtgtctgaggagttttgtctgtggctcgtcctgctacagaattacaggcacgcgccaccgctccgggctaatttttgtatttttttagtagacagggggttt[144 bp omitted]agtggctcatgcctctaactgcagcaatttgggaggctgaggcaggtggatcatttgaagtcaggagtttgagaccagcctggccagcatggtgaaacctcatctctactaaaaatacaaaaattagccaggagtggtggcatacacttataatcccagctacttgggaagctaaagcgggaggatggcttgaacctgggaggcggaggttgcagtgagccgaggtcaagccactgcactccagcctgagtgatggagcaagactctgcctggaaaaaaaaaaaaaatagaggagagagcagagcagacacaagagacacagagacagagagggagagaagagagggtgactgctttgattcaggcaagacttctcagtcccagaatgaacccactgttgtgccaagactcagtcatgtccaggtgtatgactcgagattgctgaaggaatgcccggggcagggcacaggcacaggttattggagagaaggagcagagaacatctctatgtggccaagactcccagatggccctccatatagtcacacacagctatcctaaagactacatttcccagcatcccattgcaatgaggctcctggccagtgggagcaggcagagtgatgtatggaactcccaggttctgcctgaaacaggaaagggcactttctcttcttctttctctcttcctggctggagggcagacttggtgacagccatctaggaccatgaaggcaggcttactccccgatggatggcagagccccaggtagatagagcctgggtcctgactccagtgaggtgcctacagtcctgggctgcaaactcttggacttctactcaaaagaggagaaaacttcgatctcatctaagccactatatttggggggctctttgctacagctcctggattcatgtagcaaacataccccggtttcctcctgtattacttaccatgctctgcggctgctctggtgggctgctctgggacggggccgggggtggaatgggagctggtggggcaggagcagggggccctgccctggcctcagatccctcagtgatgggggacagctctggctccggccccccgggccctggccccccatgacgatggaagaggcggctgatgatctgctggtactgtttcttgtgggtagggggcagggccacagcaggggcctgctccatggagcccctgcgtttgaggggccggggaatttccgccaacacccgtgccacctcctccagctcgggcaccgactgtgcctccggtggcagtgctggctgcagcctcgtggggctgagaggccttgctacagggccttcatccacatcgccagcctccagcactggtgtcagcagcccctctatctccggctcaggctccagctcggtggggggtttggggggtcctagccggaacaagagcccatcagaggacaggtccccaggagacacccaacactccctctccacaacttccagggcatacaaccagcacatgattttctgtgtgacctcagggaagttccttgccctctctgggctacactttccttgggctgtgaataatatacaattatgatgcctcccatttattgagcagttagtatgtgcctggcgctttacatgcctaccttattgtaatctcaccactgctttgtgaggtagatacactgccatctccacattaccgaaagggaatctgggcctcagagaggacaagtcagttgcccaaagccatgcagttgggacttgaactcagttctggctgactctagaatctacttctaccaaccgtgatagatgtgattttctgagatcctgagagtttcctctcctaacatctcaggcagaaaactccagcaggaagtagaatcctggtgtttaatgatttcttctctgtcttactcattctgacagtaaagcaggtggaaataaaaatatgcattattggctgagtcgagtggctcacacctgtaatcccagaactttgggaggccgaggcaggcagatctcttgagatcaggagtttgagaccagcctggccaacatggtaaaaccctgtctctactaaaaatacaaaaaaaaaaaaaaaaaaaaaaaaattagctgggcgtggtggcacatgcctgtaatcccagctactcggaaggctgaggcacaggaatcgcttgaacccaggaggcggaggttgcagtgagccgagattgcaccactgcaccactgcactccagcctgggcaaaagagtgagatttcatctcaaaatatatatatatacacacacacacacaaacacacacacacattatatatatagtgtatatatatttttatatagtatgcatatacatataaataatacacacacacacacacggctgagcatggtggctcatgcctgtaatcccagcactttgggaggctgaggtgggtggatcacctgaggtcaggggttcgagaccagcctggccaacatggcaaaacctcatctctactaaaaacacaaaaaattagttgggtgtggtggtgcatgcctgtaaccccagctacttgggaagctgaggtaggagaatcgcttgaacctgggaggtgtaggatgcagtgagctgaaacctcaccactgcat[215 bp omitted]gaggcaggagaatggcgtgaacccgggaggcggagcttgcagtgagcaagcaccactgcactccaacctggaagaaagagcgagactctgtctcaaaaaaaaagagtgaaactctgtctcaaaaataaataaataaataaaccccaaaacacacacacatacacattatttcattgaatccccgtcacaattctatagggtagatattattaatctctcttcacagacgggaaacagagtttcggacaagtaatttatcttcagtcacacagcaagttagcagtgaagagagactccagcccatctgcttaactcactgatctcacacctcaaaatattaataaattattataactaatatggtagctatttatttgagactgggtctcactctgtcacccaggctggagtgcagtggcgctatcacagctcactgcagcctggatctcccaggcttaaatgatcctcccacctcagcatcctgagtagctgggactacaggcgcccactaccatgcccggcagattttttgtacttttatttttagtaaagtctattttagtttcactatgttgcccaggctggtcttgaactccagagctcaagcaatcctgtctgcattagcccaccaaactgctaggattacaagggtgagccacggtgcctggctaatatggtagctattgatagcttactatgtatcagatcctatttatttatttatttttgagacagagtctcaccctgtcacctgtgctggagtgcagtggcatgatcttggctcactgccacctccgcctccttggctcaagctgagtagctaggactacagtggtgagccaccatgcccagctaatttttttttttttttttttttttgatagagatgggatttca[131 bp omitted]gaatttaataacatatgtcaataggatcgattctatcattatttgcctttttttttttttttttttttgaggcagagtctccccgtcacccaggatggactgcagtggcgcaatctcggctcactgcaacctccacctcccgggtccaagtgattctcctgcctcagcctcccaagtagctgggactacaggcgcccgccaccatgcctggctaatttttgtatttttagtagagat[136 bp omitted]gaggcccagtgaggttaagtgacttgcccaaggtcacacagcgtggaaccaggcagtctggcttcagggtccacacttaacctttgagctatccctggctcctacccaaattcccaaactcacctggcctagctctctgcagggacagtgcttgtaaagaggcatttggctgtgatctccccacctcccagggctggtctggtccccctgccatttgtcctcccttcacccagtcctctagggccctcattgctgactcaccttcgttcacagggggccatgtctgttggggatgctggggggctggggtaggggtttggggttgggtctggggctgtgggggcagctggggctgtggttgtgattgtggctggggctgtggttgtggttggggctgcagcttaggcgggggtgctcgggtgaagaggggggacccagggagcatggcgcggctggccccgtgctcccagaaggcgttctgcagcttgaagatcatgctgagggggatgggacgctggcgcggggccccgcggggctgggggctggaggggggcatggggatgcggctgacgggctgccagctgcgaggcaaagtgcccgacggccccgcggagcccagcgagcgccggtagctgcccgcgtctgaacgccggtcgctggccagaggagagaccttgtaattgcgcggcagggtggcgctagtgaggttgtcctggggaagagggaagggagaaggggatcgggtgagagagggaaggtggaggggaggtaaagacaaaagacgagaagggagaggaggtgagggaagccctgggagtgagggagaagaaagggtgaggaaggagcagaaacccagcacagtgaagggagagcgtgggaacgggcgccgagacccagatcgcagccccgagggggagactggccttgaccccgctcccccaccccactcctcgaccttccccagcctctcctccccaggcgtcgcctcctcaccttgccggtgccccccagtccatccaggctgctctccctccaaggcaacagctgcaggctcggcgaggcaggccttgcgaagacgtccaggcctgcggggcgggaatcattagggtctgtggggctgcctctcctccgggtcctccattccccgggcctccaccactcacgttcatagctcgctgtctgcgaaggcttcttctcgtacgccacgtccaggtcagactcgttccaggctttcggaggccgccggcgcagcgtcaggtcgtctggggagaagtttccagggaggatgagacgggaggggtggcgagccccggatcctgcccgctttgaccccgcgagtcaaaggccccgcgaggggcccctgggttcaccttgcgcgcgcagaggcggggcgaatgcgctgccgccggagcctagcagggagctcccgaaggcggacgctggcgcgtcgtaggctgtggcaggggggcgcggtgacggcccacgctcggggaagaaggcctggggcccctccgccagggggctgccgcggggggagcctgcgcggcccaggaagtcgaaaggcgtggggggaccctgctggcggagcgggcctggcccgggccgcggggagggcgcacggccgagggagctgcctgcgccatcgaaggcgcggggccggggcgaggtcgcgcggtccaggctgccgtaggcgtccggctgcaggtagagcggggtgcgcggcgacgacggccgtcccttgggggacagcgggctgtaggggtgtagggttggggcactctctgatcgtccgaacggggtgtctgcgccgtcggtggccgccttccggggggaccctcggctgccgaagggctcagggatcgagctggagctgtaccggggcggctgtggggaggccagggcattgagggatggatcaaaggagacattagtggaagggttggtgtgtgggcgggggtgtcaagagagatcactggaggtcaacccagaggaggctgaccggccatggaaattcaggcacagagagcccaggtgagtagtggtggggagacagccctgaatcagcactgtggctagcccattactctatgtcacctttatgccacttaggtaaacacctctttccttctgagggtccctttagatgtccacttccactggtcccctcttttctatttctttctttctttctttctctctctttcttttctttctttctttcctctctctccttccttcctttctctctctctccttccctccctccctccctccctgcttgcttgctttctctctctctctttctttctttctttctttctttctttctttctttctttcttttctatctcggctcattgcagcctcaacctccctggcttagtgtgatcctcccacttcagcctcccaagtagctgggattacaggtatgcaccaccacacctggctaacttttgtatttttagtagagacagggtttcaccatgttagccaggctggtcttaaactcctgacctcaagtgatccgcctgtctctgaaagtgttgagattacaggcgtgaaccaccgtgcccagccagatttttaaaaaatcatttgtagaggctggtctcaaactcttagtctcaagcaattctctcacctcgccttccaaagtgctgggattccaggtctgagccatcgcgcctggcctggtccccttttttcaagttcccttgaagagcccacaacctgcataactatatggggcaattttgcctgaaatccaggcctctggtctggactgtggcgagaggctggctttggagatcaaggtgggaaccaggcttaccctagaagggggtccggcctgcgggccaggaggcgcgggagagtctgaccacagcgactccagctgcttggtcagttcatccaccttggccgccgccgtgtccagctccatctgcttcagatccatgtgtttcatggccagcgctgggaaggtgggagtggaggtaaggacctggcctcctggcaggggccggcctcagcacccctcgcccgctgccgaggtccccgcctcgccagccccgccccctactccagcttacactggaagttcatgtccagaaagtcccgcgcgctctggaatgcctcgctgtccatggtgccggccggagcgggcgcctgcatggtggggagggagggagctggctaagaccccgcccctctagaccccgccctcagggagtcagacgccgtcaggagcgggacaacgcctcaactcagttccttcccctggaagccctttaccctttcacctccccagctgggaaatgccaactcctccaaagccaagtccatgcgccacggagaagtccaaacccagtctaaaacctccggaattcactttctctttctttttttcttttctttttttttttttttttgtgtatgtgtgtgagacagagtctcgctctgtcgcccaggcgggagtgcaatgacgcgatcttggctcactgcaacctccgcctcccgggttcaagcaaatcttctgcctagctgggactacaagcgcgcgccattatgcccggctaatttttgtagttctgggattacaggagtgagtctccgcgcccggccgtgtccatctctttatctcagtcctaagacctgaatcactccttgaacaattatctattgatcacctacaatgtgccggtaaacataggatggaataactatgaattactgaatgtttactagggaccaggacgc[354 bp omitted]ctagaacccatgcctactgcttggggtataatgtagtaaatgtagtaaaaacaatatccgccgggcgcggtggctcacgcctgtaattccagcactttgggaggccaaggagggcggatcacgaggtcaggagagcgagaccatcctggctaacatggtgaaaccccgtctctac[198 bp omitted]caacaacaataaccagccaggcgcggtggttcactcctgtaacccgagcactttgggaggccgaggtggatggatcgcttgaagccaggagaccagcctggccaatatggtgaaaccccgtctctacaaaaaaatacaaaagttagctgggcatggtggcatgtgcctgtaatcccagctactcaggaggctgaggcacaaggctcacttgaacctgggaggcacaggttgcagtgagcatagattgtgtcactgcactgcagcttgggtgacagagcgaggctctatttaaaaaaaaaaaaattaattgaggggccactcccttctagagtggtgagaaatgccgtgcaccgaaagcttcatttgatggtcaaaaccaccctagcaggcaagaaagcatggctcagaaacatatgttcaaggtcaccctgcaagaagtcggtagtaatcggtttcacacccgcatctaacttattctgggtcatctctaccagattagaggggtcctagagggaagcgactgctcagcttcctttccctagggtccccattcagtggaggtctggctctcactgacccattgttagcaagaggaacagggaggtggccaggggtggaggggcagctgtggtcactggcccagtgggagggagctaggccactaggaaccggtcaggccagcaccatccctatccccatgctagccaccacacccaccagctctgccacctccctgctgcatcgaccacttagctctggcagtataggcagcagggcaggctggggcatgctgatacccgcctctgtctgggaagtcgaaggaacagaacctgttcaggctggcggctcatttggatgaacagggagtgtgtgaccttgggcgttgagtcctctccactccctgggcctcagtctccccaacatcaaagaagaaggcaaatcacctttttttttttttttgagatagggtctcgctctgtaacccaggctacaattgtgactcactacagcctcttgacctcccagctcaagtggtcctcccacctcagcctcctgagtagctgagactataggtatagcctcgcaccaccacacccagctaattttttttttttttttttttttttttttttttttgagacggagtcttgctctgtcgcccaggctggagttcagtggcgggatctcggctcactgcaagctccgcctcccgggttcacgccattctcccgcctc[224 bp omitted]ctaaggcgggaggatcacgaggtcaggagctcgagaccatcctggctaacacggtgaaaccctgtctctactaaaaaatacaaaaaaattagctgggcgtggtggcgggcgcctgtagtcccagctactcgggaggctgaggcaggagaatggtgtgaaccagggaggcggagctttcagtgagccgagatcgcgccactgcactccagcctcggagacagagcgagactccgtcccaaaaaaaaaaaaaaaaaaaatttgtagagacaggggtctcactttgttgctcaggctggttttgaactcctgggctcaagcaatcctcccgcctcagcctcccaaagtgctgagattacaggcatgagccaccacacctggccaaatcagctattctgaaaggcccctttaatctctatgagccccagactttcaaactgtaaggaccttaggactgtaactaaagttctacagagcctaaacccctcagctaaagagcctattgttggaaagttctgagtccaagattctatctttggaacattctagaattctccaatttgtctaacccagaattctgagtctttctgtaccacattctacctaacccagggttgcactgctctggaagtctagatggatggtatagtgcagctggtaaaagcatgagtaagaagtcagacttcaaaaattcaaatctgagggccgggcatggtagcttctgcctgtaatccttgcactttgggaggccgaggggggaggatcacttgaggccaggagttcaagaccaacatggccaacacaatgagaccccatttcttaaaaaaaattaaaataaaatcatcaaatctggcagcaccaccgtccaaccctgaccacagtacctcagtctcgtaatccgtaaaatggggatgaaagttcacctcataggactactgtaagaatccacctggtcagaaggtgcaggaagaattcagagctctgagaattgaggcctcaggaagaagagactacaggaataaaaactcgggcatttagaatttcagagatacacaaacaatactttgttaactgttaaaatagataaatgagcaagtctgtgcagccctaatgccagctgtaagtgactctttttttttcttttggtagagatttagtctctctcgcgcctgtggttaggctggtctcgaactcctagcctcatgggatcctccccggctcgatctcccaaagtattgggattacaggcgtgagccacggcgccatgatccccaaatttccaagattctcagattccatactgacattctctggctctcaggaaatgccaaccctgggtgtggggctgtcgcggggacaggcggtggggacgtcggagccaccagggggcggtcacgcccggacccccgccaggagggcggactgcgcctgagctcaggcccggggaatgcgcagcgggcccgggcaggtgctgtacatcccggggcaagggagctgggccgggcggggtacaagggcggggcgcgggggtggcgcgggccgtgtgtctgttcccaggcctctgcccctgacctctgcctccgagtcctctcccatgtgctcccctctagctctagctccgagctctcccgcgggctctgggccagccgcaggtactctcccctgggctcctctctccgctccacccctggctctccttccctggcctcctctgcaccccagccaggttctttagggctaaggatcctgtggacttcctggaggagtcatcttcagtaggaaccgggtcagagagccagactgagctgggaacacccaggctggactcctacagccctgtcgggtcacactgaatctggagaggctccactgtctctgggactcggtttcctcctttgtggacgtctatggaatgggctagggcctttcttgctctaagcctctacttgggcttgttatttagcttctctgtgcctgtttcctcatgtggaccatgggaagaattaataccttcgcctcaaaggggtatgaggattgagtgacataatttataagccgtgattagaacaatgcagtgcgcgaaataaagttcacacatacaggattcataattaccagatgtccttggctgttcattataataacacagggtctggcaacagagtgaggggtccagactcaatgtaatttttttttcccctaaaagggccctttcaactctttctgagatcatacaagccctgagttttgacacccagggtctcaacttcctgagcccttgcctctcagagtcctaaatttcccctgtacattcctgagtctggccagtgatcaccctcagtcacttagggacgggagggctgggagagccctggaagattccagacagaagctggcaaaagcccagggtgtgggcaatatccactctccagcctccgtttctccactcgtaatgaggagtccttccctggggtcagcaaaccttattcaaagggagacctctcagtcacccaagattcctctagacaatgcgagctttcctacctacctacctaccagctctgagcttggtacacccagagccctgttttggcaaccacggttattatttttaatttcatttcaggttatcatcaaatgcccttcaagcccagacattgggaaacactcctctctcatcagatgctcgcctcccccattctgtttttaatcccccttcttaggacgcatgggggtggagagaacggggagatagacagagggaggtgcctggtcctgccctccccccgcctcaaggacagacagacacctccagaattagcctctgtccctcccttatctcccacaataccccaggtcagacagatgggcgtggaggtgacatttctcacctcagggtcagggcaaggagccctgaggcagaaggttagtcagaaaatctggcgggggcggatggaatcccgtcccccagagagctgcagaagaaggaggaggcagaatcctgaccctacaaactctactgcctgtgtgagctccaagcctcagtttaccccttcctctccgtgtaatggttaaatgcccggctatgcaaacctcccagaatccaatagccgctttccggaattctgccctgggttctagaactacctctgcaaacccagctgtttcccaccccataaggcaataggggagcccacctccgccagggggtgccctagggcggatgtcccttctctggttaggcaggtctgacgcccaggttaatgacatgttgggttcgctcagcggcacagaggaggttggagatctgcctcggtgttttctctcctaccccgcccccatccccgagccgaaaagtcgggggagagccgggacacagcctccggagggaccccgggtacctgtcctgctccacttcaggaacccaggctccactatccctgccccacccttaattctgctcagagacctagaagatcggtcgagacagcagcttgaggctggcagggtggtcacccattccaccttgagccccaccagtctgagcctctcatttctgaccaagactcggggattcgaacccctatactacccaaagactcggcttcctagagccccccagttcgagggactcaggaattccagctccaacgtctccccgggatgaaggggtagaatccctccattccaagaattcaggcatccgaacccgctttccttccctccagtaaaacaggcaacggagtttccttctaaggatccaggtgtcggcgcgccccaaattccgccctgggacctggcgtccgagtcccctcccaatcctcccagggacgcgggtgttgggctttttcagggcctctggtccccaggagggtgaaactcacggatccgggcagatcctggcacctgggggcttcctccagctcgggctccggcttggggagcggagaacggggcggggcaggagctgggaacaggttagacgacgtgacttgggctggagggaggcgggtcccggtggggagggggagccaaggtcgcctcgagcaccttgggacttgtagtcccggagggacaggacgtagcccaagacgatcccatttggattcacccagagtccatttcacagacaggaagggcgaggcccagaagccgagagcgaccaggccagggagatacagaagagccgagacgcctgcctcgctgtggctggagactgactcctgagcccttgccccaccccttcaggcgcactatcccctttcctgatcagtatcccccagggtctctgagcccgaatctccccgtcgataaaaagcgcgggttggatcttcaaaggatgtcccagcaagagttcaaaatcttagtttggactacaacccccagcagcctccgcgaccgccctcgggcgactctttgcctcgggtcctgtgggaattgtagtcctggagcccgcaggggctgcaccccggtgtctctctcgcccacgcgaaggaaaccgtctggagatcctggataggggaaacatttccccttccccttgaccctccctccgctctggaaagcctctcccacctggggagaaggggtgccccaattctggagtaggatcctaaatcttggcagagggggcgggaagtggcgctgacacactggccaggaatgcagtcgggtcaccctgtctagccaccgtctcgcggctccaaccgccgcccaacgcggggcggccccagtgggaagggaagtgggtgcgtcccccaaatctgtgtccacgtgccgctgtttacacgctccctggggcagggaggagtcgccgatcaggtcccttcctgaaagtcatcgaggtttcccacgcatgagactaaacccccgagggcatctacaagtcccatttgatccacaaacgctacaccgtgcccagcaccactccacgcgtgtggggctcctgggtccgaggctccgccctcgagaaccacaagctcctccccctatgtttcccgctcccccggagtccagaagccccgcccctggctggaacttcacgccctccggacggattgcccctatttctccattttcccgcttctcccagtcaagttctgaacttgtgaggcatctgggcctccccagaagacatttaacacagaaagcacagccctactaactagtattcttacctgtctcttcaagaatttcagaccaatcgaccgtcctgtctctttaaggcttaggaagagcagtgtggctgcccctttaaggaggcgttgcaacaaaccatattggacagacgatgggggcgacccatcgggacccgacgggcctctgactccagcaatacagcgaatcagcggctttcgggaatacatttttcggaaaaagacttcttcctcggttttctgctctgcacacgttgaaattttccccagtttttcctgcagatcgggagtcgagcaatgcctacccccgcgctcccgcaccagttgggcgctcccggatgatgccctacccctttggatccacgtggtctgcaacctggtgcgagcagcccgggctacagggttgcctgaggtgtgggtcccaggatggaggagccccaggccggcggtgagggtgcgggttgacggggtgcggagggtgcgttggtggaaggagaaaggggcgtccgagagggttcgggcggaaaaggaggcgtacctgcaagcaggacttgcgaagagcgtgcattcccagtgggcgaacgggaattcgaacggagagagggttatcttgtggggggctacccgtggagagcaaggcgcccccaggggttggatcggtgaaattgaggtcgcccctggggaacaggtgggcagaaaggagaaaccaggttgaggggactggagtgctcacgaggttaagaccaatggaccgataggcgcgccctgcaagattggaccggcaaggaggtgtcagtcgaccccatttccccttctgctgcagatgctgctcggttctcttgtccccccaactttaccgcgaagcccccagcctcagagtcccctcgtttctccttggaggcgctgacgggtccagatacggagctgtggcttattcaggcccctgcagactttgccccagaatggtgagtggtcttgttgacggaaaagagggtcccggtccagaccccaagagcgggttcttgaatttgtcacaggaaagaattagaggtgagtcacagagcacagtgaaagaaacaagtttattggaaactactcctttacagagtagagtgtcctcagaaagcagggggagaaacccacagccctttgttagtatttctacttataagaaactataaggaactatagttaaacttggagtgtgcagataagctcactaaaggtaggggctattggtgttatccacgaccattaatcctgcaacctaagcttgctcatttatgttatatttaagtaatgggggctgcattcttaggacatttggacattctgcaggcttggtggaacatgttctgtatggccataaatattctgtaattataattggtggtcagcctgggatgtggttattttcaggccataagcatgaaccttgtaagtgcctagctactcactttaagatggagtcactctagtcatgttttattaaaaaccagaggccagccaggcgcagtggctggtgcctgtaatcccatcctttgggaggccgaggcgagcagatcacttgaggtcaggagttcaagaccagcctggccaacatagtgaaattgtctctactaaaaatacaaaaattggctgggcgtggtggcaggtgcctgtaatcccagctacttgagaggctgaggcaggagaatcgcttgaacccaggaggtggacattgcagtgagccgagatcatgccactgcactccagcctaggcaacagagcaagactctctcaaaaaaaaacaaaaaaaaaatcaaaaaaccttccctctcctgttccacttaagcctctgccctccctgtttctctctgtagcttcaatgggcggcatgtgcctctctctggctcccagatcgtcaagggcaaattggcaggcaagcggcaccgctatcgagtcctcagcagctgtccccaagctggagaagcgaccctgctggccccctcaacggaggcaggaggtggactcacctgtgcctcagccccccagggcaccctaaggatccttgagggtccccagcaatccctgtcagggagccctctgcagcccatcccagcaagtcccccaccacagatccctcctggcctgaggcctcggttctgtgcctttgggggcaacccaccagtcacagggcctaggtcagccttggcccccaacctgctcacctcagggaagaagaaaaaggagatgcaggtgacagaggccccagtcactcaggaggcagtgaatgggcacggggccctggaggtggacatggctttggggtcgccagaaatggatgtgcggaagaagaagaagaaaaaaaatcagcagctgaaagaaccagaggcagcagggcctgtggggacagagcccacagtggagacactggagcctctgggagtgctgttcccgtccaccaccaagaagaggaagaagcccaaagggaaagaaaccttcgagccagaagacaagacagtgaagcaggaacagattaacactgagcctctagaagacacagtcctgtccccgaccaaaaagagaaagaggcaaaaggggacggaagggatggagccagaggagggggtgacagttgagtctcagccacaggtgaaggtggagccactggaggaagccatccctctgccccctacgaagaagaggaaaaaagaaaagggacagatggcaatgatggagccagggacggaggcgatggagccagtggagccggagatgaagcctctggagtccccaggggggaccatggcgcctcaacagccagaaggagcgaagcctcaggcccaggcagctctggcagctcccaaaaagaagacgaagaaagaaaaacagcaagatgccacagtggagccagagacagaggtggtggggcctgagctgccggatgaccttgagcctcaggcagctcccacatccaccaagaagaagaagaagaagaaagagagaggtcacacagtgactgagccaattcagccactagagcctgaactgccaggggagggacagcctgaagccagggcaactccgggatccaccaagaagaggaagaagcagagtcaggaaagccggatgccagagacagtgccccaagaggagatgccagggccgccactgaattcagagtctggggaggaggctcccacaggccgggacaagaagcggaagcagcagcagcagcagcctgtgtagtctgcccccgggaaactgaggaactaaagaaagctgaaggtgcccacctgggccaccagaaggtgacacccccagaatccctccccagagactgcaccagcgcagccagcaggagcctggcctgggaggacgatttattattacactgggggtttccttggcagctggggtcatcagggtactttcaagaagggctcgtgcaggacatcaaacagcctccgggcctggatgggagggagaaaaaaatgaggaaccagtcattaaaggagctgtttcctgggtaaatctagagtggggttttggttctttattttcccctataccctcaagcatttatccattgagttacaaacaatccagttacaatctttttaagttattattattattattattttttttttttttgagatggagtctcgctctgtcgcccaggttggagtgcagtggcgcaatctcggctcactgcaagctccgcctcccgggttcacgccattctcctgcctcagcctcctgagtagctgggactacaggcccctg[131 bp omitted]ctgcgcctggctaagttattattatttttttgagacagtctcctggtgtcacccaggctggagtgcagtggtgtgatcttggctcactgcaacctccgcctcctgggttccaacgattctcctgcctcagcctcccgagtagctgggcctaaaggtgcccaccactatacccggctaatttttgtatttttagtagagacaggggtttcaccatattggccaggctggtctcgaactcctgacctcgtgatccacctgccttgacctcccaaagtgctaggataacaggtgtgagccaccgcaccctgccaagttattttaaaatgtaccattattattgactatagtcacctggttgtgttatcaaatagtatgtcttattcattctttctttgtgtgtgtgtgtgtgtgtgtgtgtgtgtgtggtacccattaaccttccccatctccctgccagcccctaactaccctccccagcctccaggaactatccatccactcttatctccatgagttcaattgttttgatttttagatacacaaataaataagaacatgcaatgtttgtctttctgtgcctggcttatttcacttaacataataatccccagttcattatgttgtaat[135 bp omitted]tgcctcagcctcccaagtagttgtgattacaggcacgcgccaccacacccagctcattttttcatttttagtagagacaaggt[131 bp omitted]aagagtatccattgtgtgtaagtaccacattttctttgcctggtcatctgctgatggacacaggttggttctaagttttggcaatgtgaactgtgctgcaacaaacaggagtgcagatacctgttccatacactgatttcctttttttggggatatacccagcagtgggattgctggatcatgtggaacctcaacttttcagtttttagaggagcctccaaactgttttccatagtggttgtactgatttacattcccatcaaaagtatatgagggttcccttttcttcacatcctcgccaccatttgttattgcctgtccaccatttgttattgcctgtcctttggataaaagccattttaaggccgggcaccatggctcacacctgtaatcccggcactttgggagaccgaggtgggtggatcaccagaggtcaggagttcaagaccagcctgaccaacctagggaaaccccatctctactaaaaatacaaaaactagctgggcatggtagcgagtgcctgtaatcccatctactcaggaggctgaggcaggagaatcgcttggatccaggagacggaggttgcagtgagctgagatcatgccattgcactccagcctgggcaacagagtgagactccatctcaaaaaataataataagccattttaatagagctgagatggtatctcattatagtttatttttggtttttggttttcttttttgagatggagtctcactctgtcacccaggctggagtgcagtggtatgatctcggctcactgcaagctctgcctcccaggttcatgccattctcctgcctca[137 bp omitted]gcctcccaaagtgttgggattacaggcgtgagccaccatgcccggcctatttttggttttttttgagatggagttttgcttctgttgtccaggctggagggcagtggtgtgatttcagctcactgcaacctccgtctcccgggttcaagagattctcctgcctcagccactcaagtagctgggattacaagcatgcgccaccacacccaactaatttttatatttttagtagagatggggt[136 bp omitted]tgatcaatgatgctgagcaccttttcatatgcctgcttgccatttgtatgtcttttgagaaatgttaattcaaatattttgcccactttttgattggattattatattttatcctatagagttgttagaactcttatcttctgattattgattccttgtcagatggttagtttgcagatattttctcccatcctgtgtgttgtctcttcactttgtggaatgtttgctgtgcagaagccttttattcttttttttttttttaatttttgagatagagtttcactcttattgtccaggctggagtgcaatggcgctatcttggctcactgcaacctccacctcccgggttcaaacgattgtcctgcctcagccttccaagtagctgggattacaggcatgtgccaccatacctggctacttttttgtatttttagtaaagatggggtgtctccatgttggccaggctggtcccaaactcctgacctcaggtgatccagccgcctcagcctctcaaagtgctgggattacaggcccaagccaccgcacctggcttagaagctttttaatttgatgtgatcccatttgtccattttgctttagtttcctatgcttatagggcattactcaagaaatctctgcccagttcaatgtcctggagagcttctcaatgttttcttgtagacgtttcatgcattgaggtcttagatttaagtctgtaatccattttaatttgatttttgtatatggcgagagatagctatctagtttcattcttcctcattggattgcttctgctttgagacaggatcgctctgtcacccaggctggagcgtagtaacatgcttatagctcactgcagcctcaacctcctgggctcaagcgatcctcccacctcagtctccccagtagctgagactacaggcacgtagcaagctcacaccaccatgcccagctagttttttttatttttagtaaaaatgaggtgtccacttgcccaggctggtctccaacttctggcctcaagcagtcctcccgccttggcctcccaaaatgttgggattacaggcggaagccactgtgtctggtctttggttcttttttcaccttaaaactttggggtctcaggttgtgtttatttggggctctctccttcccccaactccttgggttctttcccagagctcttactttctgagggcccaggcctgggcataaggccagatcttctcttgatgcggcgatgagctgttccagagactgaaaggtgaaagcgaggggtcagggcagttgagcacaaaagcctcccctgtcccagctgaggaggggcctcagatattccccaggggagatgagggcctgtgggaaggcaggacgggcaaggggtgggcagggagatggaaggaaatgggtgacaggctttctaaaaaaggcaaggggacagaaatgcctatggggcaggggagccattccttactccaaatgtggtcaggagggtctgactgtccgttttgttgactgacttcacggtggtcagacattcagtcacctggaaagggtggaggcaggagtgtgtcggaagaagaaaggccagcaagactgagcctaggagggcagggctgggtcacagctgtgtccccagactgcctggcgtgcaggaagcactcaataaacgctttttttcccaactgattaaaaagtcatctcaggctgggcgtggtggctcatgcctaataatcccagcactttcgaggccgaggcgggaggatcacctgaggccaggagttcaagaccagcctggccaacacactgaaaccccatctttactaaaaaatacaaaaattagacaggcatggttgtgggcacctgtagtcccagctactcaggaggctcaggcaggagaatcacttgaacctgggaggcagaggttgcagtgagccgagatcatgtcattgcactccagcctgggcaagagagtgagactccatctcaaaaaaaaaaaaaaggaattaggcaggtaattgggcagagggaacagaaggggcaagtgcttggagaagcgagctaggcctgggagaagtgaagtgtgaagtggaggccacggggcttctgagcctgacgggcccttgttgagcctggtgagaagtctgggctttctctcggggtactggggagccatgggaggattttgagctagggagggtagcagcagatttgtgctcaggaaaacccctctagctgcagtttcggtgggatgggccaggaaagacgaggcccagggatgaatggacagtgccttaaaattggaactgaagctcaaccacccaggagctgcggggaggcccaggcagggatgggaggtgaggtggcctcacccgggagacgaagtcctgctctagcttctccatcaggaggtccgctggtttctgctcataggccttgtaggtctccaggtaccgcccagcttcctcggggctgggataacaggatacagggcagccgggaggtgaggtatcagattata[136 bp omitted]caacatggtgaaacctcgtttctactaaaaatacaaaaaagtagctgggcttggtggcgcgtgcctgtagtcccagctactcaggaggctgaggcaggagaatcgcctgaacccgggaggcggaggttgcagtgagccaagatcacgccattgcactcccgcttgggcaacaagagtgaaactccatttcagaaaaaaaaaaaaaaaaaggccgggtgtggtggctcacgcctataatcccagcactttgggaggctgaggtgagcagatcaccaggtcaggagatcgagaccatcccgactaacatggtgaaaccccatctctactaaaaatacaaaaaattagccgggcgtggtagcgggcgcctgtagtcccagcttttcaggaggctgaggc[131 bp omitted]aaaaatcaaaattccagcccatcccccgccaaatacaacctggtagtaaccactgctgggcgcatcttgatatcttttctggctacaggccagctcttgggagcccaaccccacttctccctgggtaaccctgggccagtggtttgctctctgggcctgtttcctcactgtaaagtggggtggtcaggcatagtggctcatgcttgtaatcccagcactttgggaggctgaggcaggaggatcacttgagctcaggagttcaagaccagccgggacaacatagcaaggtgttgtctccacaaaaaattaaaaattagccaggtgtggtggcgcgtgcctttagtctcagctgctcgggaggctgaggcaggaggactgcctgagcctgtcaagttgaggcttcagtaacctgtgatagcaccactgcactccagcctcagcaaaagagcaagaccctgtctcaaaaaaataataataaagtggggaggatggtatgactttgaagatcagagaatactctggaatgctctgtaagtgccaaaagccacgcctggcactgctgaagaaatgttagctattttggaagggaagtcagcacacaaagtgtttgtactgggtttgacaggaggaaaaccagaaacactgcttattttcccg[135 bp omitted]acatggcaaaacccgtccctactaaaaatacaaaaaaattagctgggcgtggtggtgcacacctgtaatcccagctacttgggaggctgaggcagaattgcttgaacccccaaggcagagccgagatcgtgccactgcacttcagcctaggggacagagtgaggctctgtatcaaaaaaaaaaaaaaaaaaattaagaccttgttttacagatgaggaaactgaaggccagagagaggcagtgcctgcaccaggcccacacaggaaggagaagggaagggctgggcagggtgggatgggggagcagggaccaatcccaggtggagcctgaatgaggcagggaagccctcatctcacctccaggcgaggatcaatgtgcagtcggccaggatacacatcttagccagctccttgagggcctgctggggatctttctggaggagaaaatcagaattagaaacctagaagccaggaattacaaaaattagccaggcgtggtggcaggtgcctgtaatcccagctactagggaagctgaggtgggggaactgcttgaacccgggaggcagacgttgcagtgagccaagatcgcgccactgcactccaacctgggcgacagggtgagactctgtctcaaaaaaaaaaagaagaacaaaaaaagaattaaagcctgaaaacacagtagctcaggatgccaagagcctctcacccaattgtcactctctaagctcctactgggtgcctggcccgtgctaagcagtgctaggacccagcagtggctgagacagccctgactctgccctcccagggctcacagtctgatgagcaggacagacctgtccccagacactgatgatctggagtggccagggctgcgatgtgggagccagaggagggactgagcctgcctgggggatcagggagggcttcttggaggaggggacattagagctgagacccaaaggaggatgaggaggaggaaaggatgaaaaggagaccagaaaagggaattccagacataaagaacagcatgggcaaaggatgggaggggaaagagggcttgaggaattataattcgctccctacgggagagaggatgtgaaattccatgaggagcatggaatcttagagacgggcctggagaactgggtagaggttggaggtcacacagggccccataggtcatggaagggagcagaactttctcctagggtgcttaggagccatgtgagttttatgatctttttaatttttttcagacggagtctcgctctgttgcccaggctggagtgcagtgacatgatcttggctcattgcaacctccacctcccgggttcaagcaattctcctgcctcagcctcctgagtagctgggactataggtgcccaccaccatattttttgtattttgtagagatgggggtcttcactatgttgcccagactagtctcgaactcttggcctcaagtgatcctcctgcctcagcctctcaaagagctaggattacaggcatgagccactgcacccaacccaatggaagaggaatgcttgaggccaggagttcaagaccagactgggtaacatagcaagaccctgtctctaaaaattaaaaaaaaaaatcacctggtgggggtggctcacacctgtaatcccaacactttaggatcacctgagatcagaagttcaagaccagcctgaccaacatggtgaaaccgcatctctactaaaaatacaaaaaattagccggtcatggtggtacgcacctgtaatcccagctattcaggaggctgagtcaggagaatcacctgaatccaggaggtggaggttgcagtgagccaagattgcaccactacactccagtctgggcgaaagagcgagactctgtctcaaaacaatcaatcaatcaatcaatcaataaaaattagcaaggcatggtgtcatcccagttgctcgagaggctgaggcaggagaatcgtttgaacccaggaggcagaggttgcagtgggctaagatctggccattgcactccagcctgggcgacagaggagactccgtcttaaaaaaataaaagagagagatatggccaggcacggtggctcatgcctgtaatcccagcctttgggaggctgaggtgggtggatcacctgaggtcaggagttcaagaccagcctggccaacatggtgaaaaccagtctctactaaaaatacaaaaatcagccgggcgtggtggtgcatgcctataatcccagctactcagaaggctgaggcaggagaatcgcttgaaccccagaggtgaaggctgcagtgagccaagatcaagtcattgcactccagcctgggcaacaagagcgaaactccgtctcaaacaaacaaacaaacaaacacaaaacaaaaagaagagatatttaggtggcagagatctgggactaattgaaggggatgtggggaaagaggaaatagacaattttgccctcccctctccttgccaacataatgtcttggtgacccatgtcatctcagatgtgaaaaacgttcctcgctgaggttttagctgcatttcctcttggaagggattcaacagcccactgcacaacctcaaagcccggtgaggctggctagggagcagcccctgcttaccacatccacctggacaagcaggacccgcaaggcgaagttcttccccaggctctgcagccgcccatggatgtagtctgggtgcaggttgtggtagcggaggctggtgggggcagggagcgggagttgagaggtctcagtctcttcaagacccccaaagcccttttccctctcactggaatactaagggctcagagtacggcatgggggacagagggtcctgaggcccacagagggtaagtcacttgccccaggtcactcttccaagaagatgctccgcagggattggcagccagggccacatggctgtgcttacctagaagaccagacccctggcttcttcatgaagaggggaagagacttgggcttcaaggggagaacaggtgccaggggccctagagagtgtgggcacggggacactgcatggctcgcggtgggaagcagggcccactgccaaaccatctgctctggccttggagggctacggtgagggcttcatgacccagggaactaggactggctctgcccagcagtctgcagctgtcacagcctgcagggagcacaggaactcagaggtttcacttcctctgtctggccctgtctgcagaggggcccctaggttggaggggaaagttgtttaactagggtagagatgggagaaatcctgcttctcatcaactccagtcaaggatgtctgggacatgagtgacccagtccctcctccgtcagatccaggagtctgggcccagcccctcctcccttagacccaggaatctggccccagcccctcctcccttagacccaggagtccaggcccccagcccctcctccctgagaccccaggagtccaggcccccagcccctcctccctgagaccccaggagtccaggcccccagcccctcctgcctcagacccaggagtctaggccccagcccctcctccctcagatccccaggagtccagccctcagcccctcctcccccggacccaggagtccggcccccagcccctccttcctgagacccaggagttcgggctccagctcttgttgcactgggcacctccaggccaagaccccctgcctccaacacagggtcccaccaaggcccagaacctgcaggaccatgcccagaggcttctcatagaacagtccagaacactgggacatgaccctcccaggccagtggggtgcccttcctgaagtctggggtggcgccgcagagctcacctgaggaacagggcacaggtgctctggcccagcacatagtcgggaattacgtcgccaaattcccagggcacattgcgcacgaacttcagtacgggattgcccctctggggagggacgaagggcagaagccatcaatagggatgacccttgataaccacagggccctcctccacctcttcttgcacctcctccctcctcccacctcttcccacacctcctgcctcctcgcacctcttcccacacctcctccctcctcccacctgtggcagggtcttttccagcttctctctcctcctaaccctggacagtccctgatcctctgatccaggctcctcccctccatgcccactggcaccaggcctttcctaaagggtccccgggtctgtctccagctcagccctctccctccagccccagtctgcgtgtcctgtggtcctgaacacttcctgccctcacgcccagcaactttttgtgtttttagtagagatggggtgtcaccatattcgccagactggtctcgaactcctgacctcaggtgatccacctgcctcagcctctccaaagtgctgggattacaggtgtgagccaccacacccagcctcattcagtacattttgaataaattaacaaacctggggtgaggaaacagagctacaccaatacagccacagccccagcaagtagagctggggcactctcaacccacacactgctgtcgaatgaatgaatgaatgaatgaatgaatggggagaacaaagtggctggaactcagacctccttgcactggagtcatccctagaacagcgtttcccactgaaaacctcaaggcctcacttctccgtctccctcctcacctgccgagggctcacaatgatgctgttggattttgccccgggtttcagggcctggttgggcgtctctcctgccaggggctctgaccctgtggggcacgtggccccagccccttccagaggctgtgagatggcatattcggcgtaggtctgaggggccgcctgggccgaggtgtccacagtgggaaggctctgtgtagatcggaataagggcttggcctgtggggagaaagggagtttgcaggggactggttggggtgagcagaggacatctgaggccctgtgagttcctctcccctttctttttctttttttgagacagtcttgctctgtcacccagactggagtgtagtggcactatcttggctcattgcaacctccacctcccgggttcaagcaattctgcctcagcttcccaagtagctgggattacaggtgcccaccaccacgcccagctaattttttttttttttttttgagatggagtcttgctctgtcacccaggctggagtgcagtggcgtgatctcggctcactgcaacctccgccccccaggttcaagcgattctcctgtctcagcctcccaaatagctgggactacaggcgtgtaccaccacgctggctaatttttgtatttttagtagagacagggtttcaacatgttgtccaggctgatctcgaactcctgacctcaggtgatccgcccgcctcggcctcccaaagtcctgggattacaggtgtgagccacagcacttgacccctctcccctcttcagggctgcccatcctccttcctcctaatgtcccttccagaaggctgagagctcaaaatctgaattcagccacttctcccccactcctcagcctccactctggtcccagccaccagcgtttcacccttggaccactgaagtcacttcctcaccagctccttgcccacaccctcgccccctggaagtctgtcccctaactaagtcctcatgtccctcctctgctcagagctggtgggtggctcctgcctcagagtgaaagccaaagctgtcaccatcacccacaaggctctagatctgtccctgctccttgcctcagaaactacaccttctaccacttctccttgctttctctactccagccccaccagacttcgttctgcccttgaacacggcaggctctctctgacctcagggctttggcactggctgttccctctaccccagatgtcgccatggctcactccctcacctctttcacgtctctaccaagatgtcacctcctcagagaggccctcccttgaccttcctatctaaagtaggaaggggccaggcatggtggctcatgcctgtacatcccagcactttgggaggccgaggtgggcggatcacttgaggttcgagaccagcctgaccaacatggtgaaacccgtctctactaaaaatacaaaaattagccaggcgcgctcctgtaatcccagttactcgggaggctgaggcaggagaatcgcttgaacccaggaggcagaggttgcagtgagccgagatggtgccagtgcactccagcctgggcaaaagagcgagactctgtctcaaaaaaataaataaataaataaataaatagagtaggaaggtcctctcccccatcatgccctacatccttagcccactttccttttcttcatagccaatgctcatcacccgtcgattgttttcccttgggaaggagatttcaatattgccaggtccttccatttaccaaaatatgtctaaagtgtagatttttttaagattgcaaaacctggcgattcttaaacacgagcaataaattcatgtcttgaaaaatcagggtgctggcctcgtaaaacacatcaggggctacctgctgaatgccagtgtctggcctctgccttagccctctcttagaaccacccatccatttcacagatggggaaactgggacctggggaggaccaaggactgtttccccaagtcgtccgtggcccccaaatccactaacccacaccctggtcccacaggccccatcctatcctcttcgtcctaacagcccccagcctcccaggggccccgcatctccttgtcctaccactccaggagggacctcatcctcgtcgaggggtatcacaaatttcttccttgctggcggccctgagggctggggcaccccctctttgtccttcccagggtccatctggagcctgaaagggaaggtgccaggagcgagtgagccactggcgtctacgttctcatcccgcagcaggaaccccccactcacagccgtcccccacaaaactccgagagctccatagcgtcaggtccccaacacccagcgctagaggctctgtaacgccacgcccctttgacctccaccttcggctcgccccgccccttacaggtccacaagtcccatcgctccgcccctcgcccccaccggattctattggctccgtccccaccatcccccgccttccgttcgtccggcccccgaggctagcatctggacgccctccccacgcctggccttgtccatctctcagactcggcaatgattggcttccgcggcgccaatctccacccgcagtctccgcctcccgcacctgtggtccgggcctcacggtttcagcgccgcgaggcctcacctgctggtcttggagcctcaagggaaagactgcagagggatcgaggcggcccactgccagcacggccagcgtggcccagggctcgcagcacttccggcctctctggccccgctccccaggagagtagagcatagagcagggcgatctctgtacaactctctatggttctggaggaccgcggaggtcgtgggaggagagagatgtggcctgaggatctggctcccaaactgttaagtttcaaagcccttactgagcgcttctgtgtgcccagaatcctggcagggctcagtggagaacagatcgcaggagatccaacttggtccctcctctcagtaaggagagacttaagtttgaatccaactcagacattgacttggcttcagtttcctcattcattcatttattccacacctattccccccacgcgcttcctctcttcccggtcctgtgcgagtccgtgctggtgacacagcagtgaccaacgacagccccgtgttgtcctcccggagcttacggttcagtaagggacacagacacgttcccagtgctgacccagaatgggcaggtctgggatgggagatcccgggagagccgtgggatgggggtcagggggagcgcctgactcagccccggagtccggaagggcttcctggaggaagggacatctgagcaggggcctggctgatgagttagtattagtcacttcctgaaaggatagtatcacactgttctaacttgcagctctctgattactaaggaaatggaatgttttttgtgaaagtattggtcttgtaaattttgtcttctgtgaattgcttgctcatattccttgtccatttttaaaatgggttgtatggcttttttattactattaatttctaggggtactttatggattctgattctaatccttagttacccatattgcaaacatttcctcctagtttctactttgggctttaactttagttatttttggcacagaagttatttgtgtttatgcgcaactatttatcaatctgttccgttctgacttttgcttttggtgtgttaagagccctgccataacccagggtcataatgataaattcttttttttcttttttttttttttttcgagacggagtttcgctcttattacccaggctggagtgcaatggcgcgatctcagttcactgcacctccccctcccgggttcaagcgattctcctgcctccttagtagct[137 bp omitted]ctttgtgacctcccaaagtgctgggattacagtgcacggctataatgatatattctatcatttcttttatctacgtaaaagataaaagccccgtgttgtcctcccagagcttacagttcagtgagggacacagacacggtcccaaacagtaatgacctagaatgagcaggtcatctggctttaatctatgtaagatttatttatttatttattattttttgagatggagttttgctcttgttgcctaggctggagtgcaatggagcaatctaggctcactgcaacctccgccacccacattcaagcagttctcctgcctcagcctcccaagtagctgggattacaggctaacttttgtatttttagtagagacggagtttcaccatgttggccctgctggtctcgaactcttgacctcaagtgatctgcccacctcagcctcccaaagtgctgggattacaagcatgagccacggtgcctggccaagatttatttttgaaagtgcaccgaggtcgttgtttatgagtgatgtaaccaattgtctcaagttgaccaaaggtagatcttttctccactgttctgaaattctacctttatcacataccaaattcccatacacacacgtctatttctgacatttctgttatgttcattgatctttttatttattcttgcctgcatgtacatgacatccctctgtttctttgttcacatcagtctttcatctatgggtgtctatctgtgtctacattttcccattttacttaattttttttttctgggcatggtggctaatgtctgtaatcctagcactttgggaggcctaggcgggtggatcacctgaggtcaggagttcgagaccagcctgaccaacatggagaaatcctatctctattaaaaatacaaaattagagtcccggtgcagtggctcacacctgtaatcccagcactttgggaggccgagacaggcggatcacgaggtcaggagttcaagaccagcctggccaatatggtgaaaccccgtctttactaaaaatactaaaattagttgggcgtggtagcgcacacctgtagtcccagctactcaggaggctgaggcagaagaatcgcttgaacctgggaggcggaggc[135 bp omitted]gaggcaggagaattgcttgaaccctggaggcaaaggttgcggtgagctgagatcgcaccattgcactccagcctgggcaacaagagtgaaactccatctcaaaaaaaaaaaaaaaattttttttgagacaaggtcttgatctattgcccagatttattgtcctgaaccttgcttacctcaaatgcctttttcttttcaccctaacaattgaaatccagaattctaggctgggtgcggtggctcatgcctataatcccaacaatttaggaggccaaggtgggcagattgcttgggctccagagttcaagaccagccagggcaacatgacaaaaccccatctctacaaaaaaacacaaaaattggctgggcaaggtagctcatgcctgtaatcccagcactttggaaagctgaggcaggagaatcacttgaacccgggaggtggaagttgtagtgagccaagatcacgcaattgtactccagcctgggcgacaaaagcgaaactccatctaaaaaaaaaaaaaaaaaaaaaaagctatgtgtgttggtgtgcacctgtagtcccagatactcaggaggctgaggagggagaattgcttgagcccaggaggcagaggctgcagtgagctgcgattgtgccactgcactccagcctgggtgacagagtgagaccaaaaacaaacaaaacaaaacaaacaaacaaacaaaaaaacgaaagaaaagaaaggaaagaaaaaggaaatccagaatcctaggttcttagtattgtttcttgcaatgttagaagatataggggccaggagaggtggctcacgcctagtaggaaggaaggagaatcagtctaatagtctcatcactaggtataattttcccccaggaggccgggcacagtggctcacgcctgtaatctcggcactttgggaggccgatggaaggtggatcacgaggtcaggagttcaaaaccagcctggccaagatgatgaaaccttgtctctactaaaaaatacaaaaaaaaaattagccgggcgtggtggcggacgcctgtaatcccagctactcgggaggctgagacggagaattgcttgaacccaggaggcggaggttgcagtgagccgagattacaccactgcactctagcctgggcgacagagcgagactccgtctcaaaaaacgaaaaaaagaaaaaatgaaatatgcctctgtatccaagaccatacagcgattctagaagtaggtcatcccaagtagaagggcttgtgactcagttatccccttggggaatggaattgccagacttaaccctgcaactcctgcgttttctgcaagggggcgatggtgcaccacaagaggattggaagtgttggggagccggggcctctctgctccgccagaacccagcgggggcaggaccccctagaaggcggcccattccccgctcccgattcatttccttgaagcagaagtgcggtaaagggcccgccgcctgcgatcagtggaattctgaatcggttaacgttagttaagagcgaggggaaaaaattgccctgggttctacgttatttccaagttggcaagttggatgttggatttctaccctcagtttcttttctttttttctttttctttctttctttcttttttttttttttttttgagacggagtctctctctgtcacccagactagagtgcggtggtgcgatcacacctcactgcagcctcaacctcccgggctcagatgatcctcccacatcagcttaccgagtagctggaccacaggcgcgcgccaccacgcctggccaacttttgtattttttttgtagaggcgtgggggtgggggggtggggtctcactatagcccaggctggtctcgaactcctgggctcaagcgatcctcccttctcgccctcccaaagtgtcgggattactgtagtgagccactgctcccagcctaagctgtttcaaaactaaactttggaatcccggattcgaatctccccggctcccagagttgcgcgttcgaatcccccagccgtatccaagctccgattccgcctctttcttccaaacgccccaagttccagaattcagccgcaactccagtttgggccactccccagctacggcccctgctcccatcccaaaccttcccctcctctcaacttcgagccctttgttcgccccggaacgggtggggtggggacggagactgtaaggacgggaccctcaccgacaattccgccaaaggggacctgaacggggggcggagagcagcccggccgaaggctctggaagcgggcaccgccggggggcgcagtgaccaggctggcgtccccgcccgcctctaaacttagccgcggtgacgcgcggcccggcgatcgcggcggggccggggacgcaggggggcccgagtggaggggggcggctcggctcggcgagcctctatttatagcgcccggagcccgaaatagcgcggagcggagcggccgggatgacgcgggagccgccgggggctgactcacccggccccaagcggaggcccccggatggggggcagtggaggcgcctagcccctactccgcgtcctcccgggcaccttttttggtgggacatcccaagtctccgctggagaggctgtggatggatgtacagcaaaggaaagatctgcagcatgagagactgaggttggatcagaagtgggacttccacacacacaaaaaaccccagaactgggccgggcgcggtggctcccgcctgtaatctcagcactttgagaagccgaggagggcagatcacctgaggtcaggagattgagaccagcctggccagcatgatgaaacctcatctctactaaaaacacaaaattagccaggcgtggtggctcatgcctataatcccagctactcgggaggctgaggcaggagaatcgcttgaacctgggagacagaggttgtagtgagccaagatcgcgccactgcactccagtctgggcaaaaacagcgaaactccatctcaaaaaaagaaagaaagaaggaaagaaaaataaagacagaatggaggacctatttatacaaaatgagaaaggcggaaagaggggaggtgaaccagatatacacacttgtttctcaccagcaagagaactgggatgttctggaggcaaaggaatggactcagggaccctgggtagttgccattccagagcacatgccattctccacttgtcacgatttcttgcatactgttcccattccctagaatgttcttccttgccttctcagccttgagaactcatgtacctccaggacctggtgcccagggcaattcctttatttttattattatcattattattatttgagacagagtctcgctctgtcacccaggctgtagtgcagtggcatgatcacgattcactgcaacttccgcctcccaggttcaagtgattctcctgcctcagcctcctgagtagctgggactacaggcgcatgccaccacacccagctaattttttatttttagtagagatggggtttcaccatgttggccaggctggtttcgaactcctgacctcaggtgatccacccgcctcggcctcccaaagtgatgggattacaggcatgagccaccgcgtccagccggagcaattcctcaaataaaaactccgtgacccactgaactgggagccccataagggcagggtcaaggccatctcagtcatcgccttgtccccagcgctgcccagcacaggacaggccttgggataaattaactgcatgaataaaaggtgctggtgataaaataaaatgacatttcccgttataatagcaaatgttgattgcatgctctgtgaccggcacgcatgattctgagccttatctcctgtgggcctcgctgcagccctgcagggatgtacttttattattattatcaccgccatccctatgttagagatgaagacaccaggcccaaaggggctaaaagtactggatctcactgcttgcactcagagctttctcttaaacctaggtcaccttggctccaaaggtgttcggtttccagcatacatacatctgggtcctgtggaaccaaaagctagggagtgagtctcagcctgcagcccaaagaaccttagggggttccccagcacccctttgggggtctacaaatacaaaattattatcataagcggggcgcggtggctcatgcctgtaatcccagcactttgggaggctgaggcatcaggcggatcacgtgaggtcaggagtttgagaccagcctggcaaacatggcaaaaccccaactctactaaaaatacaaaaaattagcagggcatggtggtgggtgcctgtgattccagctacttgggaggccgaggtgggagaattgggagatgaagtttgcagtgagctgagattgggccactgcactccagcctgggcaacagagcaagacctcgtctcaaaaaaaaattaccataataatattgacataatatatgatacaccataataataatacttagttggggggtggggtctcagccttccccaggctggagtgcagtggcacgatcttggcttactgcaacctccacctcccgtgttcaagcgattctcccgcctcagcctcccaagtagctgagactatagtcatgcaccaccatgcccggctaatttttttgtatttttagtagaaacggggtttcaccatatcagccagtgcagtttccatgatattgcaacagaccaaatgcagacacacacgtgaggacccagctgtcttctgttaagcctgacgtgaaagtgatttgcaaaaattaaaacaatgcccttcctctcactaagtttttgtttcaggctgtgcatggtggtacatccctgtaattccaggactttgggaggtcaaggtgggagaatggcttaagcccaggagttcaagaccagcctggagggccgggagcagtggctcatgcctgtaatcccagcactttgggagactgaggcggtggatcacctgaggtcaggaattcaagaccagcctgaccaacacggagaaacccatctctactaaaaatacaaaaattagctgggcgtggtggcacacgcctgtaatcccagctacttgggaggctaaggcaggagaatcacttgaacccaggaggtggaggctgcaatgagccaagatcatgccattgcactccagcctgagcaacaagagtgaaactccatctcaaaaaaaaaaaaaaccagcctgggcaacttaggaagacccctatctctacaaaaaatgttaaaatgagctgtgcttggtggcgcgtgcctacgttctcagctgcttgggaggttgaggtgggaggatcacttgagcctagcaggtggaggctgcagtgagtcttaattatacccctggcaccccagcctggacaacagactgagaccctgcctcaaaaaaatttttttttattttggaaaacatggttattttcatgtaaaagatataacttacattaacattcaattaattttttatttttttatttttttgagatggaatctcgctctgtcgcccagcctggagtgcaatggcgcaatcttggctcgctgcaacctccgcctcccgggttcaagcaattctcctgcctcagcctcccgagtagctgggactacaggcatgtgccgccacaccgggctaatttttcatattttagtagtgacggtgtttcaccatgttagccaggctgctctcgatctcctgacctcatgatccacccgccttggcctcccaaagtgctgggattacaggcatgagccaccacgcctggccaacacaaaattaatttattattattattattattattattattattagttatttttagagatgggggtcttgttgcgctgcccaggctggtctcaaactcaagcgatacttccaccccagcctcccaagtagctaggattacaggtttacaccactgcacccagctacttttaaatgaatcaacaaatatttctaaaatttctcagttttgatttccattacagtaaatattgatagaaatcatacacatcaacaaaaactctttggggtcctcaatacattttttaaattttagacagggtttcactctgttgcccaggctggagttcaatggtgcagtcataactcactgcacgctttgaactgggctaaagcagtcctcccacctcagcctcccaaatagctaggactacaggtgcatgccaccactcctggctgcttttatttatttttgtagagacggggtcttgctatgttgcccaggcagaggccttcaataattaggagtgtaagggggccaggtggagtggctcacgcctgtattcccagcactttgggaggccgaggtgggcggatcacgtgaggttgggagttcgagaccagcctgaccaacatgacctgaccaacatggataaaccctgtctctactaaaaatacaaaattagccgggcatggtggcacatgcctctaatcccacctactcgggaggctgaggcaggagaatcgcttgaacctgggaggcggagtttgcggtgagccgagatcgcgccactgcactccagcctgggcaacaagaatgaaactctgtctcaaaataaataaataaataaatggattaggccgggtgcggtggctcacacctgtaatcccagcactttgggagaacaaggcaggcagatcacttgaggtcaggagtttgagaccggcctgggcaacgtggtgaaaccctgtctctactaaaattacaaaaattaagccgggcacaatgcctcatgcctgtaatcccagcactttgggagacca[134 bp omitted]aaggcacgagaatcgcttgaacctgggaggtggaggttgcagtgagccgagattgcgccattgtactccagcctgggtaacagagtgagagtccatctcaaaaacaaacaaattagccaggcatggtggtgcacggatgtaatcccagctacttaggacgctgaggccagagaattgcttgaacccgggagacagaggttgcagtgagccgaaattgtaccactgcacaccagcctgggtgacagagcaagactctgtctttaaaaaaaaaaaaaaaagaatcaatgaactaacaatcatacaaacctgattagtgtcatgaaggacaagaatgtggaacatcattttaactttgaaggagaggacgagtggatgggagggtagcggaggtttctctgtcaaaggagcatttaaggagagacctggctgggcacagtggctcacacctgtaatcccagcactttgggaggccaaggtgggtggatcacgtgaggtcaggagttcgagaccatcctggctaacatggtgaaaccccgtctctactaaaaatacacgcacacaaaaattagtcaggcatggtggcatgcgcctgtagtcccagctactcgggaggaggctgaggcaggagaatcacttgaacccgagaggcagaggttgcagtgagccgagattgtgccactgcactccagcctggccaacagcaagaatgtctcacacacacacacacacaaaaaaaaaaaaaaaaaaaaagaggaagaagaagaagagacctgtccatgtgccctggctcacacctgtaatcccagcactttgggaagctaaggctggcagatcgcttgagcccaggagtttgagaccagcctgggcaacatggtgaaacaccgtgtctctccaaaaaatacaaaaaaaaaaaaaatcgcatggcttggtggcatgtgcctgtagtcccacgtactcgggaggctaaggtgggaggatcacttgagcccaaaaatgtcaaggctgcagagggccatgatcatgacaatgcactccagcctgggcaactgagtaaagccctatctcaaaaaaaagaaaagagaatctatctggcagttttctctcttgccttccaatcgttgcatctcatttatttttcttgtcttacagcatttttttgtttttgcttttgttttccgagactgagtcttgctctgtcacccaggctggagtgcagtggtacgacctcagctcactgcaaccttcgcctcccgggttcaagcaattctcctgcctcagcctcccgagcagctgggactacaggcgaacattgccacacccggccttttttaaaaatttttttatttttatttttattgttttttttgagacagagtttcgctcttgttgcccaggctggagtgcaatagtgcgatcttggctcactgcaacctctgcctcctgggttcaagcgattctgctgtctcagcctcctgagtagctgggattacaggcatgcaccaccacgcccggctaattttttgtatttttttttttagtagagatggggtttttccacgttggtcgggctggtctcaaactcctgacctcaggtgatccacctgcttcagcctcccaaagtgctgcaattacaggcatgagccatggtgcctggccaaatttttgtatttttagtagagacggggtttccccatgttggccaggctggtctcagactcctgacttcatgatccatccaccttggcctcccaaagtgctgggattacaggcatgagccactgtgccaggcccattttacagcatttcaaacacttccaggactatgccgcacagtaacattgattctcacagcagccctccacactacaaccctctgagatgacttatctcaccatgcccattttacagagggagaaactgaggcacagggaaggtagactcttatccaaggccacatagcaggtaaacaaacaaactaggactccaaccaaaccttgtgctctgtctcagccttaaaagaaaactcaataaacattctggcctttttgtttttgttttgagacctttattctgttacgcaggttggagtgcagtgtggtgatcacagctcactgcagcctcaaactcctaggctcaagcaaacctcctacctcagcctcacaagtagctgggactataggtgtgcaccgccagagctggctatttttgtgtagagatggggtctcgctatgttgcccaggctgctgatctcaaactgctggcctcaagggatcctcctgccttggactcccaaagtgttgggattacaggtgtgagcctccatgttcagtccacattctgtacttttttttttagatggagtctcactctgtcacccagggtggagagcagtggcgcaatcttggctcactgcaacctctgcctcccggattcaagcgattctctcaagtctcag[135 bp omitted]catcctcccaaagtgctgagattacagacatgagccaccgtgcccagcctattttttttaaaacgggaaaaatatctgtaaattgccacagtgacccacggagcctggatgaagagcgggaagcctgaggtctccttcagtctccatcctctctctgagcctcagtttccttccctatgtggaagggttggaaaagatgttctctaaaagcctcagaaactctgccgttagcgtggaggggacagaagctcaaacagattgcattagtttcttaacggctactataaca[145 bp omitted]cctgtctctactaaaaatacaaaaaattagccgggcatggtggcgggcgcctgtagacccagctactcgtgaggctgaggcaggagaatggcgtgaacccaggaggcggagcttgcagtgagccgagatcacgccactgcactccagcctgggtgacagtgagactccgtctcagacaaacaaacaaacaaaaatagttttgtagagatgaagcgggggggcggggtcttgctctattgcctacgctgatctcaaactcctggccttgacattgcaatctgcccgccttggcctcccaaagggctgagattacgagtgtgagccaccctggcctaaacatttaaaacgacatgtgtgacagccaggcatggtagcctgcacttgtaatcccagctccttggaaagctgaggtgggaggaccccgtgagaccaagagttggagatcaacctgggccatacagtgagactccatatatagtggattccaatatagtgagactttaaaatataaaataagggccgggcatagtggctcacgcgtgtaatcccagcactttgggaggccaaggtgggtgaatcacctgaggtcaggagttcgagaccagcctgaccaacatggtgaaaccccatctccactaaaaatacaaaattagccaggcgttgtgacacacgcccgtaatcccagctactcaggaggctgagggaggagaatcgcttgaacccaggaggcagaggttgcagtgagccttgatcacgccactgcacttcggcctgggcgacaggagcaagacttcatctcaaaaaagaaaaagaaaatatatatgtgtgtgtgtatatatatatataataagtaaaaataaaatcgtacatatggatctagcagactcatatacctctggttatatttccaaaggaattgaaatcaggatgtcgaagggttatctacactctcaagttcattgcagcactggtcacaatagccaagatatggagtcaacctaagtgtccatcaagggacataatggataaagcaaatgttgcatatacacacgatggaatactatacagccttgaaaagggaggaaattctgccattcaagacaacatggatggaactggaggacattattctaagtgaaataaaccagacacagaaagacaaacaccacatgatcccacttttatatggaatcttaaaaagtcgagctcatagaaacagtataaaggtggctactagagtccagggaagtgggagagggttgggaaaagagaagatgttgatcaaagggtgcaaagtttcagcgagactggagaaatatatttcagtgatctattgcacagcatggtaaccacagttaatactaatgtattgtgtatttcaaagttgctaaaatagagtttaaattttttaaatttgtaaatattattttttattttttgtcactacgtgttctcatctgattttttttttttttgagacggagtctcgctctgctgcccaggctggagtgcagtggcacaatctcggctcactgcaacctctgcctcctgggttcaagtgattctcctgcctccgcctcccgagtagctgggactacaggcgtgtgagaccacgcccagctaaatttt[169 bp omitted]gtagagatggcatctcactacattgcccagattagtctccaactcctgggctcaagccatcctcctgcttcggcctcccaaactgctggatttataggcgtgagtcaccgcacctggccctgacatcttgatgtcaatttatttgcaatatacacccagaagtgggattgctggatccatatgtgtaattttattttttatgtgtttgtttgtttgtttatttatttattttaagacagtctcactctgtcgcccaggctggagtgcagtggcacaatctcggctcactgcaacctttgcctcccatgctcctgtgatcctcctacctcagccttctgagtagctgggactacaggtgtgcactatcacgcccggctaattatttttatttattattattattattttttaagacagagttttgttctttttgcccaggctggagtgcaatggctggatctcggctcagcgtgacctccgcctccctgggtccagcaattctcctgcctcagcctcccaagtaactgggattataggcatgcgccaccacgcccggctaattttgtatttttagtagagacggggtttctccgtgttggtcaggctggtctcgaaatcccgacctcaagtgatccgccccactcggcctcccgaagtgctgggattacaggtgtgaaccaccgcgcccggcccgaagttattcctcttatctgactgtagtttggtattttttaaccgcatctctctgttcttcctctcccaaccccatctctactaaaaatacaaaattagccagccgttgtggcgcatgcctgtaatcccagctactcgggaggctaaggcag[148 bp omitted]gtgaattccccatttaggaagtgtccaagctcaagttgaaatgatggtacattgcggttcatgctgcaatgcctcaacccagttcctctccggacctcagtttcctcatttataaaatgggtgtggacgacgaggtcagatttaaaaaaataataatagtagttaataataataggccgggtgcagtggctcaggcctttaatcccagcactttgggaggccgaggtagcaggatcgcttgagcccaggagttctagacaatcctggggcaatatagcgagattctatctcaaagaaataatcataatcataataaaaataaatgaatagataagctgagacggactcaggcccagctcctgcctgcgatccctgcgggggccaccagggggcgcggcgcccctgcccaaaactccgccgtcggctctgaaccccggcggacgcgtcccgacgcccctggaagattctgcgccctgccggctcgccggcgcccgggagcccgggaggcgggtgtgcacgcggggtgtccagggcgcccccgatcgaggccccctcgccgtgcctcggggtagggggacggctgtgactcaggcgcgcgctcctccccggggccctcagtggtcgcgagggggcgcgcacggcctcgggaacccgcgcggcgccgcgtccatttttaccccagctccgctaaaaatagttgccgcgctccgagccgagcccgaaatagcggcccccagataaggcaggacgactcagcgcttccggggagcggaagggggagcgcgcggggggagcggtgctgggcgcagcccggccgagcaggcgccgctgtccccagcgcacccccactctgccctggcggtcacactcgcccccgactgcgaccccgccccgccgctagcctggctgccttcctacgtcccccacattgtatcctcatcccctgtcccccatcctcagcttcacctccattcctcatcataactcccccctcccctacacccccagcgatgtcccccactggtactcatccgcatcccccagcctgtcctactcctgtccctatttcccctctccaccctcatcgccaatctcctgtcgtcctgaatctgccccttaccatctctgtcctcaaggccaacctttatgggggcagagcagggcgagaggatcacagggagtcaggagacctgcgggctgagggctgagggctgggggtgaggatctgatttcttggtttgtttctactgtgggcaggggtaggcttagatctgggggttggagcatgggacacttcagtctggcctagtcttcagagctgaggcgaggcatggccagcatcacggctcattctgtgaccagggtcggggctcaggctggggaaggatgaccgtctttgtcaccaaatttgatcactgtgtcaccagagttagggctcagccttgagccgtttctttatttacccacctccactaatattttttatttcagacaaggccttgctctgtcgcccaggctggagtgcagtgttgcccatgctggaatgcagtgctgggatcttagttgactgcagccttgaactcctgggttcaagagatcctcccacctcagccttcctagtagctgggactacaggtgtgcaccagcacacctggctaatttttcatttttttgtagagacagagtctccatgccttgcccgccttgtccaggctggtcttgagctcctggcctcaagctatcctctggcctcctcctaggaaggcactgaaatgacaggcatgagctacagagcccgcctccactaagattctttcctcccttgcaagtcagtgattggacacaacagctccaggccttgggaacagtcagaactctgttccctgggcctaggtcttccctttgcactgagatcatctaagggcctccccatttccatatcctgagattctcagtgcccactccaagcatcagtgtcaggcctcaaggacctacactgcatgttctgggggtttaaagggagcacactgacttccctgagggtgacagaggtcagaatgagtgactaaggtcttgggcctggccctgaccctgcagtgggtgggagagatacccagttgaggcccaggtctccacccaggtagcagggtggatggcgggggggtcatccctgaggtgaaatgtgggtggaagatacctagataagtttcagagtcagtgcagagatggtaatttttaagtaacttctaaaattttcgagtagctgggattacaggcgcctgctaccaagcctggctaatttttgtatttttttgtagagacggggttttactatgttgtccaggctggtctcaaactcctgacctcaagtgatccgcccacctcggcctcccaaagtgccgggattacaggcgtaagccactgcgtccagcctaattttttttttttttttctgagacggagtcttgctctgtcacccaggctggagtgcagtggcgggatctcggctcactgcaacctctgcctcctgggttcaagtggttctcctgcctcagcct[211 bp omitted]tgaaaactgtttagaggccaggtgcggtggctcatgcctgtaatcccacccagcactttgggaggccgaggtgggaggattgcttgagcccaggagttcaagaccagcctcgacattatagtgagatctcatctctgggaaaaaaattttttttaattagccaagtgtggtggcatgcacctgtggtcccacctactcaggaggctgaggtgggtgggaggatcggttgagcccaggaggtggaggttgcagtgaaccgagatggcaccactacactccagcgtgggcaacagagaccctgtctcaaaaaaaaaaaaaagaaaaagaaaaaaagttttggtaactacaaaagggtataccttggaaaagtaaatttccctcccactctgatccccacttctcaatattaactattttttatgtatcttggccagtaggattcactgagctctcacgatgtccctggcctatgcaaagcccatcacagaaatgaagtggctggaatcattcagcactcagtgagtaggccagaccccattgctatgcccattttagagatgggaaaactgaggcttggagaggtgcaaggatgtgtccttttgagggcccggttctgaaggcttttcaaagttgaggcaaggaagtggatgagatcaaagaggcaaggttcaggccaggatacaaatcccagggagggtgacaggggtggggagtcaaggaaggctgcctggaagaagactaagggtagccaggaaggcatcttccagaaccttctgatggagggcttggatggaagtagataactctgtttggcaggctgaggaaccaccagcagcagggcgtggcccctcctcagacccacagcaccccagaggtatgtatagaagaagcaggctgcttaatgacatctcagggacacatctcggtgatagcacagccggcttagttatgacgtctgagtgatttgccaactgccttaagaccagcatccctagtcatgccccgcgggggggatgaagataagaggaagtgacaggccatcgggggaggaaggggagatgcagtcacacacagaccagggactcaggagctgagggatgtgtggtgccctctgcactagggaggggtctcccagctgcctggatgtgagggtccatcttattgatttgtctagtgaaggaggccaggctccaaggaggtatggctgtagtcagtcacactcagtttgggatggggtccgcccaggggctgcaaggatcagtcactgctgtgtccccatcacctaaggcagtaactgggacacagccggcgctccatacatcttactgaatgaatgaatcgaatgaaaagggtcagcaccgtctgggactcagtttaccctcgcggtcattgggctgcttcaaccaaggggatcgctaagaacacccctccccaccttgggtcccagatcccagatcgccagtgagtaagaaaacgggttcgcgccgttggtggactccgcccacttgtgacgtcacgagccgctcccccaggatcccgacccaggcgtctcccttgggatgggggcggagaggaacccgggagtccagactcaggccccgcccccgggagcaggcgggccgggcagggttacacaacccgtcgtcgcgtcccgagggaagtcgccggatgtcctggccgggccggggacaatgggcaaggagggcccctcccgcaggaacctggaagtggcaggggctccccctcttctgattcacccttgtttccggcccggtttagcctccttctccctggggatcctatctcctcccaactctaccctcctgtggccctgcagttcggttctttctccgaaccggcaaacctctctcctctacaccccgtaccccgtcctttcacaccttcccaacgccccccgaaactctctgccctcacactcatcgcttgtaattcccgaatcccctaaacttccagtgtccccggtccttccttcactcatccataccgggcccctcttcccaccccctcaactacccccactatcctgcccaggccctcccaatcccctccccgggctcccccaagctttcctcaatatctcccagccctccctagcccccgactcacccgcttccctccaactgaccccaatacactctcttgtcctcctaatcccagcctcccgcagttccctcctgtctcctcgaactgccccatgtccctacctcatctccccaaatcctgttccccatttccccccctcccccagccagccgcttcgccccccaccccggagcccctccccgcccctaggcccaaggccggcccgcgcccctcccgggcgcgctcccacgcccggcgcgggttcccaggccgcccccccgcggtggcccagagacccagtttgctgcggcaaaacactggtctccaggcaacaggccccgccccgccccagggccgccagatgaggctgggcggtcaggaggccaccgggccgggacggagcacccaggcctgcgcgccaaaccctcggccttggcccccagaggcctcagggcgcagaaacccggagactgaggcgcagcaaagaggagatacagagatcagggccccggagcaagaaattcggagacatgcgtggaggccgaagcaacagggaactgtcggggcgcagagatataaggaaagaccacgcgacagatcgaacaaggacggggcccagaaataagcacagaaataatgcagttacacacgggcaacaccgaggccggcagggacgcccctgatggcagaataatccatctttagtcctcaggacctttgcactcagttcgagggacttcccctctctgactctgtttctgtatttgtaaaatggggacattaatacgcagcgcttagcaaatcaggctgttctgacgattcagtgaattcgcagacccagagcttgtagcacaattcctggcatgtacactcatcattcattcattcaaccgattttttgttgttgttgttattgttgtctgagaggagtttcgctctgtggcccaggctggagtgcaatggtaccatctgggctcactgcaacctccgcctcctgagttcaagcaattctcctgcctcagcctcccaggtagctaggattacaagcctgtgcctccacgcccagctatttcttgtatttttagtagagacacggtttcaccatgttggccaggctggtctgaactcctgacctcaagtgatccacccaccttggccacccaaagtgctgggattagaggtgtgagccacggcacctgccccaatcaacaggtatttattgagcatctactatacgccaggcactggtaaagactgtgagaatgcagtattgaacaagacaaagctctctgttctggaagcttactctttggaaattggaagggggatgaccaacaataaatgaacaaatgagcaaattaagcaaattatatagtactttggaaagtagtaagtgctgggaaaagcagagacagggggttgggggttgctattttaaatgggatggtcagggaaggcctaaatgagaaggtgatgtttgagcaaagactagaagttggtttgggagaagccatgcagatatgtggcctaagcaagtgcaaagggtgtaaggtgaagacatgtctggtgtgttggaggaacacggaggcagctagtgtgggtggacagagagaacgtggggagggcactggagcagaagaggtcagagagactaagggctgatcccgcagggcccgatgggctgaggtgaagtcttttacagagtgggtcaggagctatgggagggttttgagcaaaagagggatgtgaactgtttcttatttgttaattaatttatttatttatttattttgagacagagtttctttcttgctgcccaagctggagtgcaatggcgtggtctcggctcactgcaacctccgcctcctgggttcaagcgattctcctgcctcagcctcccaagtagctaggattacaggctcgtgccaccacgcctggctaattttttttttgcatttttatagagatgaggtttcactcaacccaatgttggccaggctggtctcgaactcctgacctcaggtgatttgcccacctcagcctcccaaagtgttgggattacaggcgtgagccaccgcgcctggcttgttttttattttaacagggtcctttgggttgtaggtggggaatagactttggaggacaagtgtggagtcagggagaccagtcactgtcatggtccagttgagtccaatggtgacttggactaggaggtagtagggatcgattctggaggcctttgagttaagagaggcaaaatttgctgacaagcacattcatagcaagccatcagtagatggcagcactttccattatgttaggtggtactcaccacatccccataaaagttaacatccctattttacagatgtgcaaactgaggcccaaagaggtcgcttaacttgcctaaggtctcacggctcagtctagctccaaagatggtacccctctattgggacggctattcccaagcccacacacccgaacataacactctcagtgcctagatttacatctaaacctgtactcatccatgtgggccccaggactcccggagccatgtcctcatcagtcacatggagccggtgtagaaagtaggagctgggccgggagaggtggctcacaactgtaatcccggaactttgggaggccaaggcgggcagatcacgaggtcaggaattcgagaccagcctgaccaacatggtgaaacctcatctctactaaaaatacaaaaattagctgagcgcagtggcaggcgcctgtaatctcagctactcaggaggctgaggcaggagaatcatttgaacccgggaggtggaggttgcagtgagccaagaacgcgccattgcactccagcctgggtgacagggtgagactctgtctaaaaaaaaagaaaagaaaagaaagtaggagccagatggggagaatgctggcccaggacacttgcttagaggcaggttggcacaggcacagagggtccacccagaacctcccagcccagcatctggctcccacatccaatcacggcctaggcctggcacaccccagcactacgtgcagcaacatgtgaaacacagtcacgcatacacacggaaatgtggccttct[131 bp omitted]tgcaacgtctccctttcaggttcaagcgattctcctgcctcagcctcctgagtagctggaactacaggcacgtgccaccacacccagctaattttgtatttttagtagagacagggtttcaccatgtcggtcaggctggtcttgaactcctgacctcaggtggtccacctgcctccgcctcccaaagtgatgggattacaggcgtgaaccactgtgccgggcgtctatctctttatgtctctgtatctctctgttttcttttcttgtctctatctctgacctttgtctcactctgacccagctctgtctctctcacgcctccacactcaggatcctctaactgccgcagaatgactcttgtccctggctgtgtgtttccataggacctcacctattatgtaccatgagaacctggcctctggacaggtgtgtccagccccaggtcggcaattctggctggttgctcagaatcacctggggagtaactcacatagcataattctctgggcttctttctctgagatttttttttttttttgagatagtatcttgctctgtcacccaggctggagtgcagtggcacaatctcagttcactgcaacctctgcctcccaggttcaagtgattctcctgcctcagtctcccaagtagctgggactacaggtgtatgccaccaagcctggctaatttttgtatttttagtagagacggggtttcgccatgctggccatgctggtctcaaactcctaacctcaggtgatccacccacctcggcctcccaaagtgttgggattacaggcataagccatcgcgcccggtcgtctttctctgagattctgacccacagcttgtgggtgtggaactggaggaacccacctttaaaatactccccagtgactgggacccctgcctgcttgtactagttactgcatctgattttacagacagagaagagtcaaggcccagagagcagacagctcaccccaacatcacacagcagtcagctgcgaggggcttggtgctactcagatttctcctaagaatgtttggaaacaacctgagggagagttaagtaataaaggaaaatcacaaacagagacagagacccagaaagggactcacgggaataaaagcagaaagtgacagagatacatagagatgatgagacagagacagagagatcagagatagggttcagaaaaaaagaagagagaggctgggcacagttgctcacgccagtaatcccagcactttgagaggcggagatgggaggatctcttgagcccaggagtttgagaccagcctggacagcatagtaagaccccatctttatttaaaaaaaagtttttattaatttaaaaaaaatgcagagagagataaacacacatcagaggctgagaaagacaaaaagctatttgggggcctagaaagaccccccaccccgccccaggagagatgtattttcttttgaaggagacaataccgtctccttggcccatgctttaataggccctacttcccagaaacagccagtgccatggtttagcaatctcagccttaccaagccaggtctcctccccaggcttgatatgtaggatgcacattaaatacgtttatataacctgccctctgtgcagaatcaaggagctttacataacgtagccctgtgagtcatgcggcagacacggggcactgacctgacatgcccagtgagaggggacccctcgcccaggacctttacctggaagtgattgtgaaggataagggatcatgcatttcactgaagaggaagcagagggttagagaaggcaaggcacttacttggggtcacacagccaggattcagcacagcaaggattccaaccacatctgctagtgccttatcacgtgatcctttacagagtggaggaaacaataataaaaacacctctagtaatacaacgactgctgtgtattgagtgcaccgggctgcagtaagtactttacaaacaccgtcttatgtattccaaaacccagtgaggagctggacgctgtggctcacgcctgcaaccccagcactttgggaggccaaggcaggaagattgggtgagcccaggaggagttcgagaccagcctgggcaacataatgagacccccgtctctaaaaacaaaaaataataaaaattaaaaattaaaaaattagccagtgcctatagtcccagctagttggtaggctgaggcgggaggattgcttgagctcaggaagtgaggctgcagtgagctgtgatcataccactgcactctagcctgggcaacagaatgagaccttgtctcaaaaaaaaccaacaaaatggccgggcgcggtgggtcacgcctgtaatcccagcactttaggaggccgaggtgagtggattactggaggtcaggagttcaagaccagcctggccaacatggtgaaacctcgtccctactaaaaatacaaaattagcccagcatggtggcgggtgcctgtaatcccagctactcgggaggctgaggcaggagaatcacttgaacatgggaggcaaaggttgccgtgagccgagatcatgccattgcactccagcctgggcaaaaagagcaaaactccatctcaaacaaaacaaaaaaagcccagcgagttagggacagaatccagttattaaataacataattaaacctattttatacggagcacttattatgtactaagtgctttaccggatttgatggtcacaattctaggggtgggtgatgttatcacctccatttcaggaaggaaggaggctcagaggaagtcacaggtcaaggttccggagtgggtaactaaacccagtccttgctagccctgtatctctatcacctactcccatgcatacaggtccacaagcatgcctatgcacacgtgcaatcaatattgcactaacatctccaaacactctagttgaaatacccagagctcccgccttatatcttttctcttcctcaagaaggctaacccagcctccaatcccctaaaccttcatgagccagggaaggaaccctcttctttccctctaacgcctcagttccgccacgcggccggccgaggtcggcgctgtaaaatgctcctgctcctttaagagaatgaacagtccaggccgggcgcggtggctcacgcctgtaatcccaacactttgggaggcctaggcgggtggatcaactgagttcaggagttcgagaccagactgactaacatggcgaaaccccgtctctactaaaaatacaaaaattggtcgtgatggtgcgcacctgtaatcccaactactgtggaggctgaggcaggagaatcgcttgaacccgggaggcagaggttgcagtgagccgagatcgcgccattgcactccagcctgggccacagagcgaaagcgagactccgtctcaaaaaaaaaaaaaaaaagagagagagaatgaacagtcggccggcgttgcccggcagcgccgcgccggttgccgggcaacgtcaacaaacgacgcggccgccgtctccgtgcgcccgccccccccccccccccccacgcccgcgcagacgcggtgacgcgacggactgtggaacgccgtcgcctagcaacgcgagggctgtttgtcccgggctgggtggcgcggccgcacagggcgcagccaggaccggcccgggcggacagaccggcccgccgggagcccggggcggggggtggaggggattgcggtgatggaagcgggggagaaccgggttcccaaattaccggtttccctttagacagccgccgtctgttgtcgcccgctcctcctgtctgccccgggaccgcctccgctcgggtatctgtccgtctgcgccccctcctccccggcatgtccgtctgtccagcgcctcccgcgctgtggctgtctcatatcccccccaaaccatcacaaccaaaatagggacaagcacacacttcgctggcctgccgtttctgccttggactgccggatttccgggtgcattgttgcggttggggtccccaccaggggagacagacagacaaggggagacaatctgttcacactcaagccacagccccaaagccctcccgttcctttccccgctcccttggggttctcttgcctgtctttctcgagcctctttcaagagacaggcagcccgtggtccttccatcctgtgtccgggaagctgtccacagctgggaggttctaacaactcatccccaacacacactcccaacacccccccatccagtagcttcatgtgaccagggctggggcgaatctccgagcagagagaagaaattgagtgtgtgacagtgtgaatggatgtgactataggtgagcaacagtcggtgacaatgtgcacatctggtatttcctgtgtgagagcaaaactgcaggactcagtgagtggtttctgtggtttgcacttgtgtatctgggtgtatgggagtgtgtagccctgctgactgtgtagatatgaatgtgtgtgcagttgtgagtcttgcatgtggtcatctatgtgaaacaatgcctgtataagtacccatggatgtgcacggttttgcctctagccgtgcatttctggttctgtgtgtgtgtgtttctggttttttcgtttgttttttagagatggggtctggctgtgttgcccaggctagtcttaaactcctgggctcaagcgatccccgccgtctcagcctcccgactagtggggactacaggcaagcgccactacactcggctaattttctggttttttttgtagagacaggatcttgctgtgttgctcaggctggtctccaattcctggccccaagtgatcctcccacctcggccttccaccacagtgctaggattataggcatgagccaccgtgcctagccatgtgtgtttctggatttctgtgtgtaaccatgcaggtacctgcgtttgtgtacagattatttttcagagctccctccacagcattcattgcaatgtctaattatatatttgttcctttgtttactgtccatctcccccactggactgtgcaccctgtgagggcaggacccaaggctgttgtggtcactgccaggtccccagcaccaccctgcacagagaaggtgctcagtaattccttgttgggtaaatgaatcgatgactcttatgtccatgtcgagcacacacatccatgtaaccctgcaagtgattttgtggtactgggtcttctgtgtgtgtctagaagctgcgtgggccatagcacaggagggtctctgtagccatgtagctctaatttttggcaccccccacagtgcagggcacatatcagagcctcatggcacatatcagggccacgtggagtaggaggccaggtgcactggctcacacctgcaatcccagcattttgggaggctaaggcaggaggatcacttgagacctggagttcaagaccagcctgggcaacaaggtgagaccctgtctctacacataatacaaaaattaggccaggcgcagtggctcatgcctgtaatcccagcaatttgggaggccaaggagggtggatcacctgaggtcaggagttcgagaccagcctagccaacatggtgaaaccccatctctactaaaaataaagaaaaaaaagccaggcatggtggtgggtgcctgtaatcccagccacttggaaggctgaagctaaagaattgcttaaacccgggaggtagaggttgcagtgatccaagatcacgtcattgcactccagcctgggcaacaagagtgaaactccgtctcaaacaacaacaacaacaataaaaacaaaacgaaaattagccgggcatggtggtgcacacctggaatcccagctacttggcaggctgtggtgggaggatcatcagagaccaggagatcaaggctgcagtgagctgtgattacaccactgtactccagcctgtacaacagagtgagactttgtctcaaaagaaaaacaaaaaacaaa[134 bp omitted]cctctgcctcccgaattctcctgcctcagcctcccaagtagctgggattacaagtgcctgcaccacgcccagctaatttttgtgtatttttagcagagacgaggtttcaccatgttggcc[133 bp omitted]cactcggtttcctcatctgtcaaatagggagaataatagacccagtttatgggactgttgtgggagagtaaatgagttcatatggaaagcatttagaaaatgcctggcagaaaacaaacatttacaaaatacctgttttgattgttgtcagtattattacttcctctgtgtgtgtccttggatgtgcgtgtgcgtgtctagaatctgggttgcagatgcaggctttagctctgtagtcctgtgttactgggtacccaaatgccctgagtctcactttccttcctataccatgggcatgttccagaccttctccagggccagttgggactcaatgaagctgcatctggaacaccccaatggctacaaggcccagccgtggtctggtttcaggaaaggtaaatgaagggtgaagttgggacgggatggaattgaggttcaaatcactccatgggactgggaaagtgggaagtgaaagagggatgaaagagcgcatttgaagcaggcagactgagggtcagactccagaaaggacttcctcctaggactattttgg[132 bp omitted]aaccccatctctactaaaaatacaaaaattaggtgggcgtggtggcgcgtgcctgtagtcccagatactcaggaggcagaggcaggagaatcacttgaactcgggaggcgggggttgcagtgagccgaaattgcgccactgcactccagcctggtgacagagcaagactccctctcaaaaaaaaaaaaagaaagaaaaacatgagctgtttggagagctgcctggaggaagagaaaccagcctgagtttcacaggctagtggaatttggaggggggcaataatagcaataacaataggccaggcacggtggctcacacctgtaatcccagcactttgggaggccgagaagggtggatcacctgaggtctggagttcgagaccagcctggccagcatggcaaaaccctgtctttactaaaaatacaaaaaaaattaaccaggcttggtggtgtgtgcctgtaattccagctactcgggaggttgaggcaggagaataacttgaacccgggaggtgtgggttgcagtgaaccgagatcatgccactgcactccagcctgggcgacagagtgagactttgtgtcaaaaacaataataataataataataatgcactaggtgcagatactgataaaggctttgtgaggaattttctttctttcttttttcttttttttttgagacagagtctcactctctttcctggctggagtgcagtggcacgatctcggctcactgcaacctccgcctcccgggttcaagcgattctcctgcctcaggctcccaagtggctgggataacaggtgcccaccactacgcccagctaattttttttttttttttagatagggtctggctctggctctgtcatacaggctggagcacagtggcatgatgacaacccactgcagccttgacctcctgggcttaagtgatcctcttgcctcagcctcctgagtagctggggctacaggcttatttttttgtagagatggggtctcactctgttgcccaggctggtctcaaacttctgggctcaagcaatcctcctgccttggcttcccaaagtgctgggtttacaggagtgagccaccatgtctggccatttgaggaaatttttatttttgtctgtcttgtttcctgctctgtccccagcacctagagtgtgtgactgcagtgtgtgtgtgtgtgtgtgtgtgtgtgtgtgtgtgtgtgtaggtgtgctgattaaatatttgaatggctgattgaatgaacgaatgaatgtcatcctacaaccacttgtgagtcctggtcttaggggaaggctgggctggggccctggcctctgggatccctcttgtgccagtcccccagccctgctgttcccacagctctgtgctgaagagggcgtggagggggccagggaagggagtgtcaggcagccagccggctgcctgccctggacagcagcccagagtgtctgcaggagggagagggtagttcaggagcctgagtcaccctgggagaaaccccagccacatacctggccgctgacatcacccggccagggcacccccggcagcctagacaagctgactgaatcacaggcggaattcagccaccccgggcacgtggcctgctgtgaccccccgcaacacccccgagtggccgtctggctgcgggggttgggccgggcacacaggggtcagtgagggggcatggggcctgagtcagggacagggtggctacagccagagaccacccagccacaggcgtccatgtggggcaggaaggagaaagtttgggaaggagagcctgtggggaggccctggcgggtgaggaggaagcacgtgtgggtgtgacggggaggctgcggcttgtgggcagcggctgggcgacccacaggggtgggatggggtctgagtgtttgcgcagagaatcaccaaatcgtaagagacttggtcgtaagagtcagtcaggaggacaatggaatcaccaatgtgcttacacacgcaaaggcacacacgcacactcaacacccggcctggggaggccctgactccacccaccccaggccagcggggcctcactacccataagcctgcaagttccctaagggactgaggcctaagggacagtttcctcatctgttgagtgggggtattaacaagcattattaggccaggcacagtgactcgtgaggcagaggtaggcggatcccttggaggccagaagttcaagaccagcctggacatcatagcaagaccccttctctacaaagaaaaaatttaaaaattagctggatgtggtggtgtgcacctgtagtcccaggtactcaggaggctgtggagggtggattgctggagtgttggagtttgagactgcagtgagctattgattgcaccactgtactccagcctagacaacagaacaagatcctatagcaaaaaaaaaaaaaaaaaaaaatcactattattgtaatagctatgcttacggggaacatactttctgccaggtgctgttctaggcattctacattttttttttttaaataatggagatgacgtctcactatgtttcccaggctggtcttgaactcctgagctcaggctatcctctcgcttttttggtggctggcacgcctgtaatcccgacattttgggaggccaaggtgggtggatcgccggagcccaagagttcgagaccagcctgggaaacatagtgagatgccatctctaccaaaaaatcaaaaaattagctaagcatggtggctcatgcctgtagtcccagctactcaggatgctgaggtgggaggatcacttgaacctgggagatggaagttgcagt[131 bp omitted]atacacggtaagctttctcaagtgactctgttatgattcttagtactaaacatattattttccctttttttgtttctttctttcttttttttttttttttcggtgatggagtctcactctgttgcccaggctggagtgcagtggtgcaatctcggcccactgcaacctccgcctcccaggttcaagcgattctcctgtctcagcctcccaagtagtagggattacaggaccctaccaccatgcccagctaatttttgtatttttagaagagacggggtttcaccatgttggtcaggctggtctcgaactccagaccttaggtgatccacccaccttggcctcccacagtgttgggattacaggcgtgagccaccgtgcctggccaaatacacattatttttatccctaagtccaactaggaaggcctccaaaacagtcaccctcactgccttggtccagttctacttcttacctccctgcagtccttcctgctgcctcttctttggttatatatgtctgtagtagggagagagtgcttcagggactccctcctcattcataactcttcagaactcaatcatgattatctagatccacctccaccaggaagtcctcctggcttactccagcctcactaagcactctcaccacccaatgcctggagtggttgtagtcagtgagtgacacattgcacagtgtgtgccccctggattgggggtgggtgagagacagcccccacagtgagtggcacccctggccagggcctgggacaagtctgtatccaagggtggctctctgcttaggtctgtgtttgtacctgggtgtgtctgtgtctgccctactctgtgcatactcatatatgtgaacccgtgtgtgtgtgtgtagttgtgagtgtgtgtggaagaggctgcatggcagtggaagctaggtgtgtgattcgtgtatctgtgtgcctagagtgccttgttctatagatttggatgccactccaagcaagtcagtgggtctttttgttttttgttttttgagatggaatctcactctgttgcccaggctggagtgcagtggcacgatcttggctcactgcaacctctacctcctgggttcaagtgattctcctgcctcggccccccgagtagctgggattacaggtgcccaccaatacactcagctaatttgttgtatttttagtaaagatggggtt[133 bp omitted]acggtgtgactgtgagtgaaccttcgcacacgtgtctgtacggatatctaagaaattcttcaagtaggccgggcacagtggttcaggcctgtagccttagcactttgggaggcccaggtgagtggatcgcttgagctcaggagttcgagaacagcctgggcaacatagtgagacttcgtatctacaaaaaatatgaaaattagccaggcatgacagtgggcacctgtagtcccagctactacttggggggctgaggcaggaggatcccttgagcctgggaggtggaggctgcagtgagctgagatcgagccactgcactccagcctgggcgacagagggagaccctgtctcaaaaaaaaagaaaagaaaagaaaaaaagaagacattcttcaagtccacaactctgagggtatcactgtgagagcaggggtcctagctctacccatttgtgtgtgtgtggagatgtgtaagtctatgtagacaaaagtgtgtgtcatttactgtgtttggggtgtgaacacctatgtgatgtgtttgcacaactgcacgtgttttgttctgtgtgtgtgatcgtgtgttcaaataagtcatcttgtcgccgggcgtggtcgctcatgcctataatcccagcactttgggaggcctaggcaggaggaccattgagcccaggaggtccagactgcagtgagccgagattgcgccactgcactccagcctgggcgacagcaagaccttgtctcaaaacaaaagcaaaaacaaaaataaacaaatagtcatcaggtgcctgcacagacaaaggtgaaaggtgtctgcctgttgagatctgtggatagggtgtatatatggacatctcagcctgtctacg[137 bp omitted]catggcgaaactccatctcttctaaaaatacaaaaaaattaaccgggcgtggtggcacacgcttgtaatcccagctactcagggaggctgaggcattagaattgcttgaacccaggaggtggaggttgcagtgagccaagattgcgccactggactccagcctgggcaacagaacaagactccgtctcaaaaaaaaaaaaaaaaaaaaaaagaggctcagatatgtttctgtctgagagtctgtcagagtttaggaattagtaaatgaatgaatggtgaagatccatttactcaacaaacatttatttatttatttatttattgagacagagtctcgctctgtcacccaggatggagtgcagtggcgcaatctcggctcactgaagcctctgcctcctgggtttaagagagtcttgtgcctcagccaccaagtagctgggattacaggtgtgtgccactgcgcccagctaatttttgtatatttagtagagatggggtttcaccatgttgcccaggctggtctcgaactcctggcctgaagtgatctgctcacctcagtctcccaatatgctgggattacaggcatgagccaccagtcctgcctcatttattcttatattatattatattgtttttattttaaatttttttgtagtgacagggtcttactatgttgactgggctggcctcaaactggcctcaagtgattctcctgcctcagcctcccaaagtgctgggattacaggcatgagccactgtgcctggcttgaacaaatatttaataaccacctattgggtaccacgtgctatgctggggacaaggcagtgaccgggatggttttggccgagctttcacccagctcacaacccaatgagggagacaaacctatccccagacaatgatgagcccagattggcagagttggagggagggaccccaggagagggggccttgactcagcctggagatcagggagggcttcctggaggagaggttatgggagttaagacttggaggaaaagactatgagccacaggaagcgaagggaagagtgacccaggcagagggaaaagcacctgcaaaggcctgaagtccagggagagaggccaggcatctggaacacaacggggagaggagagacgagactagggcaccctcggagcaggtcgttcagggcctcaggagccatggggaggagtataatgcaggatgcaggggtactgggagggtcaagctaacagtgtccaatctgggttactctgcttccctgaaactccagggacatctcctccaggaagccctagggattgctcagtgtggagcggctcagccacccagtcacactcactattcaatgctgagcactgaggaggcagccgttactaaatcagcctggatttgccctcccagaggtcacagtcacaacagtcaaacacacacctgcacgtgcacactcatgaacgtgcccctcccctcctctggagcctcagaaacccacagaccttgttcctcccagggggtgtccctggggccaaagcttctgcactaccagggggcttgttggaaatgcaaaagatggctgggcacagtggctcacacctgtaatcccagcagtttgggaagctgaggcaggcagatcatttgaggtcaggagttcatttgaggttgggagttcaagaccagcttggccaacatagcgaaactctgtctctactaaaaatacaaaaaaattagccgggcgtggtagcacacgcctgtaatcccagctacttgggaggctgaggcaggagaatcttttgaacccgagaggtgaaggctgcagtgagccaagatggcaccactgcactccag[227 bp omitted]caggaaaattgcttgaacccaggggtgcagaggttgcagtgagccaagatggcaccattgcactccagcctgggcaacaacagtgaaactccgtctcaaaaaacaaaatacaaaaattagccaggcatggtggcacacacctgtaatcccagctactcgggaggctgaggcaggagaatcacttgaacccgggaggcagaggttgcagtgagctgagatcgtgccactgcactcaagcctgtgtaacaagagtgaaattccgtctcaaaataaaataaaataataaaaataaaaagatgaccacagcagatctgctggctctccaggcaattcgtgatcaccacgaattgagaagcgctgctctcaggcttaacccccctgtacctcagtttccttttctgtacaaggagatcaaaacagaatccatgtagaggactgacgtggagtgaggcttaactgagataatgagtgtgaaagtgctaagcacagcttcctaagtgcttgttttcagcagctcctcttcctcttttctatttttttatttttattttttttggggggggaacagggtctcgctctgttgcccaggctggagtatagtggcagagtcatagctcactgcaacctcaatctctcagggctcaagtgatgcccgtgcctcagcctcctgagtggctgggactacaggtgtgtgccaccatgcccagctaatttttaaatttcttgtagaggttgggggtgggtctcactat[138 bp omitted]aaatttcgaagaccgccatcactcaaccttcttgctctacagatgggggaactgaggaacagaggagcagaggtttggccagaggaaggtgggaaggacgtggtgtggctggccttcacagactctgccgggggctgtttacaggatactctgaggaaagccaggatgggcactgatacccacctccaccctgcgggaggcagaaggctaaggctcccccagccgtctcccccaagcagagctgagcccttgggagccagggcagagatgcaaccctctcccccatgctcaggtcctcctcctcctggaagctctccttccaagaggagcctcttattttattttttattattattatttttgagacaaggtctcactttgtcacccaggctggaagtgccgtggcatgatcatggctcactgaagccttgccctccccaagctcaagtgatcctctcacctcagcctcccaaatagctgagactacaggcacacgccaccacccctggctagtttttgtatttttagtagagatggggtcttgccattgtccaggctggtcttgaactcccgggctcaagtgatctgcccaccttggcctcccaaagtgctgggattacaggcatgagacactgagcctggcaaggaatgagccttatggagaagaacttgatttacccactccatgctctgcaggcaggtgtgtcatgtctgtgagtgcaggtgtgtgtgtgtgtgtgtatgtgtgtgtgtgtgtgtctccagggccaatttctcccttaggcccaggggcacagtgcctagggcccatgataaatttaaccgacccacggatatgggtcaggagggtatacatgtataaagttcaggaagactttgttttagtaacaaaacgagcatgtacaatctgtcaggagccttatgatatcttcccaccagtctcatgagtgggcactacatcttgttctcctttgtcgggtagggaaactgaggccccggatgtcctagctcaagttcaccaagctacttggtgatagaagcggaacataagcctaggccacctagcttctgggtctgcgatcgtgtgaggataaatgcccagtgtgttcgtgaacatgagcatccctgtgtgaataaattgacatacataaacccatttaataaatttcaaagccaggcgccgtggcttactcctgcaatctcagcgctctgggaggctgaggtgggaggatcgcttgaagccaggagtttgagatcagcctgcaacaaagtgag[137 bp omitted]agggtgaaaccctttctctactaaaaatagaaaaattagccaggcgtggtggcacatgcctgtaatcccacctactggggaggctgaggccggaaaattgcttgaatctgggaggtagag[132 bp omitted]tgaagcaggaggattacttgaggccaggagttcgaggttacagtgaactatgattgcatcactgcactctagcctggatgacagagcaagatcctatctcaaaataatactaatagttcaaggaacagactttgaagcctgacaccctgcatggtgttattccagctttgctacttacttgctgtgtgactctgggtgaataacttaacctctctgggcttctgtttcccttcctgtaaaatgatcatttgtacctcacaggagtgttgtgagaattaaataagttaatataagctcttgggaagaattagctcttgttatggttgtgtgaagagctttacacgagtccctctgcaggatgcatggttgttggtctgtgtgtgtgtatatatatatatgtgtgtgtgtatgtgtgtatctatgtgtatatgtgtatatgtgtgtgttgctctcttgatctctgagtgttgtgtgtgtgtcaatgtgtgagatcatatatgcacctttagtaaagatctaggggtctctgtgtgttttgggggtctgtacctgtccttggctgtacacctgaaccctacgtcttcttgtgtgtgtagggatgtgtgtcatgtgtgttgataaccatatgacagtgtgtgtttccacatgccagtgtgtgtctgtgaagctgtttctatgtggctgtgggtgattgcccacgcgtgacctggtgagcggctgtgtggaagtctgtgttgcctgtgtcgggtgtggagtctctggccagccagggtaggtctttgcatgtttcctttattccatggaggaggagatgaggggcttggatgagacagaagaatgaggggtcactccctgtctgatgctggggccgagtcactgcctactagtggctgctgtgtcatctcccagtctctgtccctccctcctggctggtggcagacagagggggcgtggaggaacagggcagggggtgggcttgaggctggacttttgtctggaaacttgaacctccacctatgccccccacgtccctctagtcttccacatctccctacaccctccctactattggggcagggaatcaggactccctgaaaattaagaaccatcgccttggctctgccacaggcttgctgtgtagcccggagacaggccctgcccctctctcaacctgtgaaattcaatgttttaaaagtgcttcttcctttgtgcccagggctgggccaggctgtgcactgggagggaagtgctgggttctctgaggtttgtgaaatagctggtagcacccttcccagtgggtgcttaagagttgggggctgtagcatctgaaatacccaagtcagtgcaggcatagtggctcatgcctgtaatcccagcactttgggagaccgaggcaggcggatcacctgaggttgggagttcgaaaccagcctggccaacatggtgaaacccccatctctattaaaaatacaaaagttaggccgggcacagtggcttacgcctgtaatcccagcatttaagaaggccaaggcgggaggatcacctgagtttgggagtttgagagcagcctgaccaatatggagaaactctgtctctactaaaaatacaaaaaaactagccaggcatggtggcacatgcctgtaatcccagctactcgggaggctgaggcaggagaagcacttcaacccgggaggcggaggttgcggtgagccgagatcgtgccattgcactccagcctgggcaacaagagcaaaactctgtctcaaaaaacaaaacagaacaaaacaaaaattagccaggtgtggtggcgcacacctgtaatcccagctactcgggaggctgaggcaggagaatcacttgaacccaggagatgtaggctgcagtgagccgagattgtggcactgcactccagcctgggcaacagagtgagactctgtcaaaaaaaaaaaaaaaaaacgtcagattcatgaaccccatttgctaagaagatttgctcaggtagtcacctgtacccctgtgagccaagattgcaacagtacatgctaagagcagtaagaaggagattgtaaagcttagaaagacctgacaggccaggcgctgtggctcacgcctgtaatctcgacacttcgggaggccgaggcaggcggatcaccaggtcaggagttcaagaccatcctgaccaatatggtgaaaccccgtctgtactaaacatataaaaattagcttgacgtggtggcccgcgcctgtagtccagcaactcgagaggctaaggtgaggcggaggttgcagtgagccgagatcgccactgcactccagcctggcggcagagcaagactccgtctcaaaaaaaaaaaaaaaaaaaaaaaaaaaaagacctgacaagtgaaagctactaatattgccattatcatttaaaaaaaccccagacacaggtttttcagggagtttcatccaaccaggcaggtctcagaaatcagaaaagaaatggaaagggtaggaaatctggagtttgacaattctgagtttgaatttcttgtgatgggatcttgggcaagtcatttaacctccctgagtatcatttttttcttttataaaatgaagatttttctctcttaaccttccagagctgttttaaggattacaaatcttctactgaaaggcgtagcacaggagctgtgcttggcaagtgccaaatacaaggcattaattattattattagaattaataataatatcccctccctcttacacattctttgtctccgggtggattaaaaggtggaaggagaggctaccaacaccatcagaagagaggcttctctctaagtttcatttcccatctcctccaaatccgcatccctcccaaacgccggacctgtaaggccagcagggtccaagacacacatcctttgcccagcggggaagattaaagctaaagctcagagagggaaaacatttcctaagctcgcacagcgaatcaggacagaaaccaggacgagcctcggaatccctccattacctccactttcacctgagcatcacagcccgctcgggactcagtttccccacctacgtgaccacaccacactaatcagggtctccttttggagatctgctcttcttctcgaatgggggcgctgcaccatcggtagaacagggtaggtgggggcgccagaggtgaaggggacctgcaggctggggtcttccccgcccgggtcagcggggtccctgcggggctagtctaagcgcctattattaccagcccccggggcggcgttgcactgcgcaggcgcgggcggggcgcgggcgcgcgcgcgagcgagcgagggattccctctgacgtcattgctaggataccaaacaaacactccgccgcgccggccgagctccttatatggctaattgcgtcacaggaactccgggaaggcggggccgggatcccctcccgccgagtggcccggaacgcaacccccgagacccccagggccccgagggtcatgcaagtgaccagatcgagtctagaacagacctcttgctggacagtgcgggactcgatttggcggggccggagatttggggaagtttgtccagcaaggggcgggtgacgtaagcaggggggcgggtcccgggcatataaatacaggctggcgggtctgtgcttcattcataagactcagagctacggccacggcagggacacgcggaaccaagacttggaaacttgattgttgtggttcttcttgggggttatgaaatttcattaatctttttttttccggggagaaagtttttggaaagattcttccagatatttcttcattttcttttggaggaccgacttactttttttggtcttctttattactcccctccccccgtgggacccgccggacgcgtggaggagaccgtagctgaagctgattctgtacagcgggacagcgctttctgcccctgggggagcaacccctccctcgcccctgggtcctacggagcctgcactttcaagaggtacagcggcatcctgtgggggcctgggcaccgcaggaagactgcacagaaactttgccattgttggaacgggacgttgctccttccccgagcttccccggacagcgtactttgaggactcgctcagctcaccggggactcccacggctcaccccggacttgcaccttacttccccaacccggccatagccttggcttcccggcgacctcagcgtggtcacaggggcccccctgtgcccagggaaatgtttcaggctttccccggagactacgactccggctcccggtgcagctcctcaccctctgccgagtctcaatatctgtcttcggtggactccttcggcagtccacccaccgccgccgcctcccaggtaagtttttgatagtaggggtgctgctttgtaggttttattttttaagtcaagggtgaaaagaataaaccccaacccccacaaaaaggcgcatcagaaccctagatctgagatggaaaaggctcacagcgcactttgcaaactgcaaagagtcgggagatgtttgcaattggttgcgtgcgtggagcgcaaggagggaacgcggcagggagggtaggctttggggcgaggtgggggtggggtgggtaatgcgctgctcaatgcaacgtgtatgcggtagcggggctgagaactttgagccggccccgggactgccccctgctcgggtcccagacctgaagctagcgcagttaggcaggtgggggaaatcccggggaagcttccagcagtctcttttcctttcctcctccttcggagcgcccacttcggtgccgggtcgccctccacccatcgggaagaggggcctcgaaccctcagccgcgctgcctccgcctcctgcgcggagacgtaacgggggacccgtgcgtaacggctgacgcgctggaatcctccgtctgacgcggggcacgcacggcgcgcggcgcccccttcgtccgccccgcccctgacgtcccgggagcgttctattttggaacgccggggccacgttgctaagggagggggcagcccggcgtttcgattggccgccggggcgcacgccttggccaatcagctttcccttcctatttgtagggtgcattttccttcccccctctctgtccccggaacccgtggttccttggcggctgggtctcttttcggcgcctctagaggcagagggaggggatccctgtcgtgacaagagcgcctgtctgcgacccaatggatctgcgaggcccttgcggggatctagtccctgggctctcaggagaagggggtgtctgcttgtgtgctggcgtttcttggagagatacggtggctgtcaccctcttctccaggcacacacagacacattcccactccctctgctcctcatgcccggttcctccggtgtgtcccaagacaggactagaaccgcgaaccgaagggcaaccagccaggtggtctccaggagctccgccccctctgggttcccaggactctgattggtcggcgagccagcccttccctcaccacgccccccgagagagtagttaagccttcagagcagttccaggagtccatttacgggaggggggagatgagcgctgctgaggcttgggggctcaggtcccgcaccattccccctccgcgacaatctgagagagctccagtggttacttttatctacctgtccgttcaccctaaactgtcactcgtcagtctcactctgagaagagacagtaacttgaaacgttgttctaaactcctaggcccgtcccccaaacacccttttgactgggacccccgcccctgcatgggacctcgcgcagaggggggtgtgtatgtgtgtgagtgtagaggaaggcttggcctaaggcctctccttctccctccccttgcctctggggtgggggtggggtgttgtggctgtgtgtgtggctgtggctccgtcccgggggttctgtcacccggctgtgtccagcctcctctccaccccccatacctaagagtcaccaacccggggtgtgattcaccacccgctggaaccgtgcaacctttccccgaggaagaaggaggaggtagaagccagttgagcagaaatcctctcattaaccactgcgtcacggtgtagtggaagggtgggtgttgtggctttttccctgtgacacacacatccacactcgctcaccctgtgctcactcacggggtcggtgtgtgttatgtgtgttgggtgtgtgtgtgtcggtgtctttgtttgtgtgtctacgcctgtgtgtgtatgtgtcaccccgtaggagtgcgccggtctcggggaaatgcccggttccttcgtgcccacggtcaccgcgatcacaaccagccaggacctccagtggcttgtgcaacccaccctcatctcttccatggcccagtcccaggggcagccactggcctcccagcccccggtcgtcgacccctacgacatgccgggaaccagctactccacaccaggcatgagtggctacagcagtggcggagcgagtggcagtggtgggccttccaccagcggaactaccagtgggcctgggcctgcccgcccagcccgagcccggcctaggagaccccgagaggagacggtgagtaagggacatcagaacttggcctgggtagggggaagcaagagaggcaggaagtttcttatgaatggaggggggctccactaaggcctcagtgttacagaaaccccaagatccttgctacacgagcgaggaccggaggcttgttttttggctcttgggggttctgaaagaagtagaggttcgggatgggtggaggagtgctgtatccccaaatctcatggcctctatctccctgactcagctcaccccagaggaagaggagaagcgaagggtgcgccgggaacgaaataaactagcagcagctaaatgcaggaaccggcggagggagctgaccgaccgactccaggcggtgaggacaggccctggggtgggagaggggatgttgaggggagctctctccccattctctgccccctctccacctgtacccttatcctgggttgagaactagacgttccacacatggaactaggtactgctgtggccagactgggtagcccagggcacaaacacagacccccatggacttaagtcaactcctggtcccccccccatttcctgaccccacggactactctcctagccttcatttcatcccaaggggccacatggggcccttgaggagaggggcgcccccatcatttctcccatctggtcttcagcaagtaacaacccattttgcctcagtttctccatctctgcaaaccctcatcaaatctcccgggctctttctacccttaacactctggaaagcctgtgaaatgaaattattccacctcctgccctagccacccacagctctcctggtgctggtggcatcccccaaaacccactcccttcctacgtcctcccttggtctgagagttccctgctgtatgcctgcagggtgagctgttactccttgagggaacaagggaattgtcaactttccttctctactttttctcttccccgggaggtagagagggaggggtaatagaagggaacacattaaaaacacataacagtggctcatgcctgtgatcccagcactttgagaggccaaggcaggaggattgcttgagcccaggagtttgagaccagcctgggaaacatagggaggacttgtctctaccaagaaaaaaaaaaattagttgggcatggtggtgcacaccactgtggtcccagctactatggaggctttagtgggaggatcgcttgagccgaggaggtccaggctgcagtgagccatgattgcactattgcactccagcctgggggacagagcgagactctggctcaaaagcaaaacaaaaccaaccacataacgattgttcattcattcaacaaacctcctgcacaccagaaacttccccataaacctggccccttctgtaccatcctttggacagatgggggaaactgaggttcctggaaggcaagacccttgccccaactcccatggccaccaggactccatctcaggaggtgttttttctcagcccggggctgccttccagcagcaagtccaagggagccatgacccgagtttcccggtcactgacatgcttttttctccttcctctctctcttctgtgacctggcctccctggcctcaggagacagatcagttggaggaagaaaaagcagagctggagtcggagatcgccgagctccaaaaggagaaggaacgtctggagtttgtgctggtggcccacaaaccgggctgcaagatcccctacgaagaggggcccgggccgggcccgctggcggaggtgagagatttgccgggctcagcaccggctaaggaagatggcttcagctggctgctgccgcccccgccaccaccgcccctgcccttccagaccagccaagacgcaccccccaacctgacggcttctctctttacacacagtgaagttcaagtcctcggcgaccccttccccgttgttaacccttcgtacacttcttcgtttgtcctcacctgcccggaggtctccgcgttcgccggcgcccaacgcaccagcggcagtgaccagccttccgatcccctgaactcgccctccctcctcgctctgtgaactctttagacacacaaaacaaacaaacacatgggggagagagacttggaagaggaggaggaggaggagaaggaggagagagaggggaagagacaaagtgggtgtgtggcctccctggctcctccgtctgaccctctgcggccactgcgccactgccatcggacaggaggattccttgtgttttgtcctgcctcttgtttctgtgccccggcgaggccggagagctggtgactttggggacagggggtgggaaggggatggacacccccagctgactgttggctctctgacgtcaacccaagctctggggatgggtggggaggggggcgggtgacgcccaccttcgggcagtcctgtgtgaggattaagggacgggggtgggaggtaggctgtggggtgggctggagtcctctccagagaggctcaacaaggaaaaatgccactccctacccaatgtctcccacacccaccctttttttggggtgcctaggttggtttcccctgcactcccgaccttagcttattgatcccacatttccatggtgtgagatcctctttactctgggcagaagtgagccccccccttaaagggaattcgatgcccccctagaataatctcatccccccacccgacttcttttgaaatgtgaacgtccttccttgactgtctagccactccctcccagaaaaactggctctgattggaatttctggcctcctaaggctccccaccccgaaatcagcccccagccttgtttctgatgacagtgttatcccaagaccctgccccctgccagccgaccctcctggccttcctcgttgggccgctctgatttcaggcagcaggggctgctgtgatgccgtcctgctggagtgatttatactgtgaaatgagttggccagattgtggggtgcagctgggtggggcagcacacctctggggggataatgtccccactcccgaaagcctttcctcggtctcccttccgtccatcccccttcttcctcccctcaacagtgagttagactcaagggggtgacagaaccgagaagggggtgacagtcctccatccacgtggcctctctctctctcctcaggaccctcagccctggcctttttctttaaggtcccccgaccaatccccagcctaggacgccaacttctcccaccccttggcccctcacatcctctccaggaagggagtgaggggctgtgacatttttccggagaagatttcagagctgaggctttggtacccccaaacccccaatatttttggactggcagactcaaggggctggaatctcatgattccatgcccgagtccgcccatccctgaccatggttttggctctcccaccccgccgttccctgcgcttcatctcatgaggatttctttatgaggcaaatttatattttttaatatcggggggtggaccacgccgccctccatccgtgctgcatgaaaaacattccacgtgccccttgtcgcgcgtctcccatcctgatcccagacccattccttagctatttatccctttcctggtttccgaaaggcaattatatctattatgtataagtaaatatattatatatggatgtgtgtgtgtgcgtgcgcgtgagtgtgtgagcgcttctgcagcctcggcctaggtcacgttggccctcaaagcgagccgttgaattggaaactgcttctagaaactctggctcagcctgtctcgggctgacccttttctgatcgtctcggcccctctgattgttcccgatggtctctctccctctgtcttttctcctccgcctgtgtccatctgaccgttttcacttgtctcctttctgactgtccctgccaatgctccagctgtcgtctgactctgggttcgttggggacatgagattttattttttgtgagtgagactgagggatcgtagatttttacaatctgtatctttgacaattctgggtgcgagtgtgagagtgtgagcagggcttgctcctgccaaccacaattcaatgaatccccgacccccctaccccatgctgtacttgtggttctctttttgtattttgcatctgaccccggggggctgggacagattggcaatgggccgtcccctctccccttggttctgcactgttgccaataaaaagctcttaaaaacgcattcgccaggctacagtgtttatttcctcctaacacccattgcctggcttccttttagtaagagaggatgaggttagattgtcgaaggactacacacacacagagatcatacacccatgcacacacacacacagacacacacctatgcaggaactccttctagtcaatgggtctacagcaggataaaaggaaggcagacagtcaggaggacttcctgtactcgcaggcagtgcctcctactagaaaaagtaagtggctacagctgggcgcagtggcttgcgcctgtaatcccagcattttgggaggccaagatgggcggatcacttgaggtcaggagtttgagaccagccttgccaagatggtgaaaccctgtctctacaaaaaatacaaaaattagcctggtgtggtggtgcacacctgtaatcccaggctacttgagaggttgaggcaggagaatcactttaacttaggaggcagaggttgcagtgacacaagattgcaccactgcactccagcctgggtgacaaagtgaaactgtcaaaaaaaaaaaaaaaagtaaggggtcagaaggttagcctgcaggtgtgggatcacagaggtgtcctagtgatggagcttgtatgctctatgggttaaaaacagacgctaaggagataaactatacacagaagaagcttaatgggctgtgcacagtggcttgcacttgcaatcccagctctttcggaggccgaggtaggaggctaggagttcgagaacagcctggggcaacatagtgagacaccccccaccccaacccatctcattatgttgagaaaaaaaaaaaaaagaggatcttgagaaacttgcacagcaaactactaaagaccactcaggctaggaatgaggcgtcatcttggattttttacaaactacaactacaaaaaacaattattttacactgaagatgtgtttccttttgttttccatatgaccactattggggccaacccaagactgactgaagcaaatatatgaccattttttttttttacacatagagtggagccatccccattgcaaaatcctagccgtctcttatttgcataacagcaagtcctctgggaattgaggtgagggtccaggggtcgctcagacgctttggtaaatcaataagcaagggaatttgtcatggtggaatccatttattaattcactcaaaaaaatgtgctaagcacctacccaactgtgctgggagttggggacactatagggactgagcctcaggtcttgccctcctggggctcacagtccattgggggacacacaccgttgccagtcagggacaacctaaagtggattgggtttgggaagcccatggggctagggaagcacagcagggacacctagcttggactgggagtcgggaaaaacttcctggcggaggggacagctgagctgagtcctagaggaggatagagagtatagaaagaaatagaaaaaggccaaggccaagaaaatagcacagccatagatctgttggtgggga[132 bp omitted]cgaaaccccgtctctactaaaaaatatatatatatatatacaaaaaattagctaggcatggtggtgggcacctgtgatcccagctactcgggaggctgaggcaggagaatcgcttgaacctggaaagtgg[132 bp omitted]gtgtggagagaggggttagtagagaccagattctgcaggtactataatgacattcccaggctaaggagtttagatcttttcttcagggcactggggagctattgcaggttttgaacacgagaggggcaggggcaggtttgtgatttaggaaagacccctctggccccagactgagcgtgactggaagggagaggagtgagactgagcaggagaccagggaggaagtggggtggggaccctgcagggtggggtgaggaggagtccagaacagggccagggacatgggacagagaggaggggaaggattcaggagacactcgggaggcaggacagttgggcttggtgagcagccggcttgggaaggaaaatacagggcagtaataaatagcatgggtcaagtggtctgagtgaggctgggagtggtggcacgcacctatggtcccagctactcaggaggctgaggtgggaggattgcttgagcctggaagtttgaggctgcagtgagctatgatcgtaccgctgcactccactttcggtgacagagtaagaccctgtctcaaaaaaaaaaaaaaaaaggaaaaaaaaaaaaagacactgcctatgagttaaccctgctctacaaggagcagtttttaaagtaaaattaaaaaaaaaaaaaaaaaaaaaagaaagaaagaaagaaagaaagagagagaaaaaagaaaaaaggctgggttgccttggacaacagacttcatctccctgagcctccatttcctcatctgtagaatgggggctgttaagaggagttgcaaggcttgtgcatgccagcagtaagtgcagagtgacggtgcaattatcattacccccatcatctttattggggtcagcctgaaccctcgatatcccataatattcacccccatccttcaagggtctgccctaatgttcccatgacacccgaccagctcagctctccttatgagagggcctcacttttctattccctttgcagccgttatcccctttgtagttgttaattaagtgtgtaattacatgatggcttaatgtttgtctcccccactgggctgactgcaccaggagaccaaggccagggctgtcacccaccgctgcgtcctcagcaaatgcttgtttgatgagtgaatgacagatgaacaaatgggcaagtatttgactgattaatcacggcatgcgtgattaaataaatgagtgagcaaacgactgaatgagtaagcaattgaaggggagagatctaggataatttccaaactgccaatatcccagaactgggtagatgactttttctccgtcttttggagtgggtttttatactccggagggggaaataagtaacgacaatcagagatcggagtgacagagaatgagtttgcgatgcggaaggccgcagcgacctctccaggtgcaggctggaggagcgcctcccgggcaacaagcaaaagaagtccggttcgataagtaagatttaaggcgcttagttactaccgcccgaaaggtggaattgaaccactctgtcgctagacagctacaggtttgaagcctgcaccccagaccactgaggatcatccgggcaggacaaccttattcccgcgcagctatataaggatcgcaaaagcttaccttttagagttatggtcgcgtcctttggaaaggtgtgagatggttgacttcaagggctataagttctccccactcatttatcgtgagagatgtccttgtaaaacgttgccttcacttcatatagtatgaatcatcctcgctccccaaaccgtctcatttacatagcgccacgcattctgggaagcagcgtttgagcacctggcaagctgttaaagggcccaggaccccctttttccaaaatgaaaagtcagctttttaagaggagagattcatgattcggcattcagaagcgccttctcggaaaattccgaattctctttctgcggaggagtggtgagtgggttcctgttagagtctgattcaccctggccccaaaggctctgagcaggcggctatagggctggtgcgacacctgctgttcttttatggaattgcgtaggccgatggagctccgcgttcattcaaacgtttattgagcgtctactgagtcccaggaactgtctcggtgctggtgacgacagacatcctgtcccgattgagtttaaacactagacataaccaatttctgcacttgcgttttatggttggagaaactgagacagactcagaaacggatagtaccatattccggttaaaacagcccatccacttagggaaatcgaacttgtgttacaatttttattacaaaaaaggtgattcttttttcttaaatttttacatatttaggaggtacaggtgccgatttctacatgcatatgttgattgcatcgtggtgaaatctgggcttttaggtgtactcatcacgaaaaattattcaatattctaagtcagtgattctttgacaataccattctcctgcatgaaactctcccatgacttccatttcagagtaaaagtcaaagtactcaccctgctttacaaatccctgtaatccagcccctttggtccctctgaccctgtctcacatactcctcttcccttggatattattggatttaggcacacagatgtcttgctgcacacatggatcatgctaccaccacagggactttgtgcttgccgatcccctagcctggatctcctcttcacatgttcccatggctcatcgcctcccttcactctgtcatctgatcaaatgtcaataccaaaaactcactgagtgaccagcactcagtggggccttccctgatcccagtttaaaatagcgagtggcggccgggcgcggtagctcacgcctgtaaccccagcactttgggatgccaaagcgggtggatcacgagatcaggagatggagaccatcctggctaacacggtgaaaccttgtctctactaaaaatacaaaacattagctgggcgtggtggcgggcgcctgtagtcccagctactcgggagcctgaggcaggagaatggagtgaacccgggaggcggagcttgcagtgagctgagattgctccactgcactccagcctgggggacagagcgaggctccgtctcaataaataataaataaataaaatagctagtggctgggatcggtggctcagggcctgtaatcccagaactttgggaggccgaggcgggtggatcacctgaggtcaggagttcgaggccagcctggccaacatggtgaaaccccgtctccacgaatgatacaaaaattagtcaggcatagtggctcacgcctgtaatcccagctactcgggagtttgaggcaggagaaccgcttgaaccggggaggcagaggttgcagtgagctgagatggtgccattgtactccagccttggtgaaaagagcaaaactccatctccaaataaaagtaataataataataaataaaataaaaatttttaaaaagcgagctctgtcactctatccccttaccctgctagacatttccccaccactctgatcaccacctgccattttctgtgtctatttgcttaccgtctgtctgcttctgtagaatatcagcaccatgaaactatgcactttatttttgatcattgctgtatctctagtgcctaaaaagtgcttgagaacatagcagatgttcagtaaatgtttgtggaatgaataaaagaatatcatcactgtctttttttcattcttcttccagacaggatcttactttgtcacccaggctggaatgcagtggcgcaaaaacggctcactgcagcctcgacctcccaagctcaagtgatcctcttgcctcagcctccctgggatgacaggcatataccatcacgcccagctaattttaattttttttgtagaaacaggggcctcactttgttgcccagactggcctcgaactcctggcctcaagtgatgcttctgccttgggctcctaaagtgctggaatttcacgcgtgagccacagcacctggcctcactatccttctttcagcctcagttttctcatttgtataaccagactagtacaactgatctcactggagaaatcatgatataaaattctgacactggctgaggcaactgggaggagctcagtaaaggctgtttctgctgggcacggtggctcacacatgtaatcccagcactttgggaggccaaggtgggtggatcacaggagattagaagttccagaccatctggcaagcatggtaaaaccccatctctactaacaattcaaaaagtagccaggcatggtggctcacacctgtgatcccagctactcgggaggctaaggcaggagaatcccttgaacccaggaggctgaggttgcagtgagccaagattgtgccactgcactccatcctgggcgacagagcaagactctgtcaaaaaaaaaaaaaaaagtttttttttttttggctggaattacaggcgcctgcccccacacctggctaatttttgttttttgtttttttaggagagacggggtttcaccatgttcaccagactggtcttgaactcctgacctcaggtaatccaactgcctcagcttcccaaagtgctgagattacaggcgggagccactacacctggccaataaaggccgtttcagtcttcaatctgttttgagcttggaggctttagtcattcccagacccaaaatctcaatcagaccctcttccaccactttttgtgatagatcaataaacattttgtcttatgggaagtttaactaagagtatctttagaaagttttggacaggcgctgtaatcccagcactttgggaggccgagatgagcggatagcttgagcccaggagttagagacaagcctgggcaacatagtgagactctgtctcaaaaaaaaaaaaaagaaagaaagaaaagaaaaaaagaaaaaaaaagtattccctctgcttggcaaatccagattcaagatatatcccctaaaccctctttgttttaattagatagttgctgctaggcacctctgtatacaaattctgaggatgtaaggactccttggaacaccgttatctgtctcctaatatgtgacgtgtgtatgacgaacaagtgagttttttttttttttgtttcttttttttggttttttgttttgagacgcagtctcgctctgtcgcccaggctggagtgtagtggcgcgatcttggctcactgcaagctctgcctcccaggttcacgccattctcctgcctc[215 bp omitted]caggctggagtgcagtggtgtgatctcggctcactgcaacttccgcctcccgggttcaagcgattttcctgcctcagcctcccaagtagctgggattacaggcatgcaccaccacgcccggccaattttgtatttttagtagagacatggtttctccatgttggtcaggctggtctccaactcccgacctcaggtgatccacgtgccttggcctcctaaagtgctgagattacaggcgtgagccactgcgcctggctgcacaaacattttaaacgtcaatatttttgtgtttatttttactattgtcttctatttctggcaagcaatactggtttctggtggcaaggtaacctttcttcttaaaatacatttgttattatattattaaatattaaaccaattttcaagaaaaatattagataaatagcagaacaggttgtagaaagatgaaggtcatgtggggaatgactgaggtttgggaaacaatattataactccttactgtgcatttattatatgccaggcccaatgccaagggctttacatgtaggtatagttatggttgacagttttcttctttttcttttctttttttttgaaacagggtcttgctctgtcgccctgtctggagtgcagtgacacaatctcagctcactacaacctccacctccttagttcaagtgattctcctgcctcagcctcccgtgtagctggtcttacaggtgcccaccaccacatccggtatttttagtagggacgaggttttaccatgttggcgaggcttgtcttgaactcctgacctcaggtgatccaccttccttggcctcccaaaggctgggattacaggtgtgagccactgcacctggcctctttttttcttacttaatttttttgtagagatgaggtctatgttgcccaaacttgtctcgaactcctggccttaagtgatcctccctccttggccttccaaagtgctgggattgcagacgtgagccatcgtgcccggcctaataagttttccatttgaggaaactgaggctttgagagatgaagtcatatgctcaaggtcatacagcgaaggggtagtagagccaggattcaaacccaagtctgtggatctttagacctcagtgttctcccagtctccccacgggtccctttgcttcatcctttccgagtttagttgtcttttttgttgttgttcttgttgttgctgttttttgatagagtctcgccctgttgcccaggctggagtgcagcggcatgatcctggctcactgcaacctctgcctcctgggttcaagtgattctcctgcctcaggctcccgagtagctgggattacaggtatgcgccgccacacccagctaatttttgtatttttagtagagatggagtttcatca[137 bp omitted]acagggtctccctctgtaactcaggctgaagtgcagtggtgtgatcatagctctctgtaacctcgaactcctggcctcaagcaattttcctgtcttagcctcccaagtacctgggactacaggcatgcaccaccacgcccggataaattttttttttttttagagacgggggtcttgttatgttgctcagggtggtctcgaacttttggcctcaagtgatcttcccacattggcctcccgaagtgttgggatcacagatgtgagtcatcatgccaggcctcagattagtgttgaaactggaagtccagggaggccctgtatttgttcccgaggcaatcagggtggggagacgtgggtggatgagagaagtttgtgaggcaggatagacacagcattgtgactgattgtttgtgggaggtgagtgtgtagaagtccagagccatacctgggtgtctggcctggtgacaccgtgggcagtgaaaacatctctgagttggaaatcaggtaggatgaagaagacgtttggttagatttagggtggaaggggcatccagaggccgttggacacgtgggtttgggctcagttgaggtggctgcacagtaggcagggtgtgggatccattagtgatgtctgccttgagcacaggcatgggaagtggctgccaaggcttggctaaccctggaatgggtggtctgtcagcatcttcccctcaatcatttctttcttttttttttttttgagacagaatctcgctctgtcgccgaggctggagtgcagtggcgcaatcttggctcactacaacctccatctcccagattcaagcgactctcatgcctcagcctcccgagtagctgtgattacaggcatgcaccaccacacccggctaaattttgtatttttagtagagatgaggtttca[141 bp omitted]gagctccttctccagagatggggaaggttctcctggagtgtcacttaagtgcctttcagtgcagaaaggtgaacaactggagggttctggaagcacaagaggcctcgggttttccacaggagtctttattacagtgtaaatccaagctcaggcctcccctgggccccatgcaaagccccggcgttggggctagtagcatccaggagacaccaacgcctcacggcgcctccagcggcgggtccggaagtgcagggtggtgccctgtctaggcaactacaagtcccagcaggccccgcggccaaggtgcctcgtctttcctggactcctggagcagagcctcttgggaaatgtagtcctggtcgctcaggtaattagcgcagagtccctagtgggagtgatcctgacacccaccgggaaaaggctcgggccgaggaggggggtgggtgggaacggacaagagatggagggggccagagggctgcgggggctgggggcaggcgtcctgcgggcagagacaccgttctcattcggctttggctttggatccggagactgcggctgctgcagaggccagggctccggtccctgggattttagctcggatcctgaaggagaaacaggtgggatcacgaggtggggcaagagacgcggggtgggcatctggggacaacggggaaagctgggtgggaaactgaccaagagcccgaagccagctcctgccctccacctagtggcctacattggaattgcctcctcagccttttcaaggggacattaccccaggagatttgcggacagcgagagtagaaaggaaaggttcccaagctcccccacttccccctcccatcgacctccgccccatgctcttacttagctttgatgtggctcaactgattggtcaccaaccccacatattggtcgatctgagcctggggagaccaaagaaaggtgaaagaagggattggaggggtttcttctctttagtcacataggaggctgcttcctccccaacctccaaattaggagttgtgaagagtggcccaccacgccacccccggctctaaacttcatagaatacattagatgccagagatgccagttatagggtcagtgagttgggccatactctgtatggagagtgatgtcaggtggaacgcacaagtatctggcagtgaggccgtgtcctgggcacgatggttaatctttgagtgagtttgcatacgtgtgtgttgtggggtagggtgagaacagaaggcactggcattggtcaccgagtccctgagtggattgatttatatactcgtgttttttaaaaaattatttatttatttgtatttatttttttgagacagggtctcgctctgtcacccagcctggagtgcagtggcatgatctcggttctctgcaacctcagcctcctgagttcaagcgattctcctgcctcagcctcccgaatagctgggattacaggtgtgcaccaacatgcccggctaatttttggattatttatttatttttttcttgttcttttttttttctttttctttctttctttttttttttttcctgagacggagtcttgttctgtggcccaggctggactgcagtggtgcaatctcagctcactgccaccactgcctcccgggttcaagcgattctcctgcctcagcctcccgagtagctgggattacaggtggacaccaccaagccttgctaatttttggatttttaatacagacagggttttaccatgttggccaggctggtctcgaactcctgacctcaagtgatccgcctgcctcagcctcccaaagctgggatcacaagcgtgagccaccatgcccagcctttttttttttttttttttttttttttttagatagggtcttgctctgttgcccaggctggagtgcagtggcatgatcacagctcactgcagcctctacctcctagggttcaactcatcctcttgcttcagctttcagagtaactgggactataggtgtgtgccaccacacctggctagtttttaacctttttgtagagatgggggtcttactatgttgccgaggctggtcttgaacttctggcctcaagcaattctcctgtctcaacctcccaaagtgccgggattacagttgtgagccactgtgcctggcctgatttaaatacagtttaattgtgagtcttggtgattccagcctgtgaaggacagagttaggactaactggcagggcatattatcatgtggctcccagctgtgctggagaaggggctgtcagtccatccgcctgtctctggataggatggatgtcagcagtcctgctaatgtcagtcttgtgggcaacagccatcccactcttgattttatttttatgtttttattttttattttttggttttttttttttttttttttgagacagactcttgctctgtcacccaggctggaatgcagtagcatttaactgacatgtcagttaaaatcaagagtgaaggccaatctcagcactttgggaggccaacgcgggcagatcacctgaggtcgggagttggagaccagcctggccagcatggtgaaacccggtctctactaaaaatacaaaaaattagccaggcatggtggcaggcacctgtgatcccagctactcgggaagctgaggcaggagaatcgcttgaacctgggaggcagaggctgcagtgagccaagatcgtgccactgcactccagtctgggcaacagagcga[137 bp omitted]atggcaaaactccgtctctgctaaaaatacaaaaattagccgggcacggtggccatatgcctgtaatcccagctactcagagattgaggcaggagacttgcttgagcccaggaaacggaggttgcagtgagccgagatcacaccactgcactccagcctgggcaacagagcaagactctgtctcaaagaaaacccaaaacaaaacaaaaacaaacaaaaagcctgtccctggctgatgctgataagacatgttacttagactctggttgtattgggaaggtgctgcagccaggacacctgtgtctggccgggacatctgtcaatgggaccccggttctggaaggagatggtcagacccccatgtttagctggggtgctgacaactgagggtgtcacactcacctggtgctgccggtacagcagggggatggtgaatagaccaatcactcctgtgggtacagagatgggggcgtcagggtgttcccaagagatgaacagttccatctggagccctgtcccccaccagactccaagtccccatttgccccttacggccttcccagctcacccagaatgagaagagtcaaaccattgaagatggcacccacgaaggtcaagatgtagaagaggagggccagctgggggtgaaggtcagggtcagcagagcccaccgggaattccctctcatgctgtgaatttacccaacagtcgccctcccaccccctagccatgcagaggtgaatgggggaacccaggaggggctgagagctccaggccaccttgagggaatccacgaggtcttctaccaggaagaagtgccgcagctgcgtggccgccgagaccacgcgggaggtgatctggtgggacaaacgttccgtctgctcccgagtcagggtgaggtccacatccaggtaggccctgcggggacaaaggagtgtggggcgactcagtgggtgaccagctcagactggtgcaggggcagctgaaacaagggagaggaatggcggttgggagaagaccagagttaggactgaggggcagctcagaggaatcatatgtagagggctggggtcagggtcagggtcaggggaagggatcgaggatgaagggtaccaggttaggatcagagattaggattgaagggtaggttaggggatcgggatgaaaaatgatcaagatgagtcggggtccgggtgggagtcggtgcctgatttgaggtcgtgggtcatgctttagggtcaggacaggggctcaggtcaggggccgggggttctcactggaaagggttggctccatccccccggtgcacggcctgcagcactttgcggtaaaccctgagagagatggtgccgcagagcagcaacagagccaagtgcgcggccacggacacgatgctaaagtgcaggaggcagaggagggagaccatcaggcctgtgaagaccactcctgacgtcctcgtgtccttccagtacagcaggtccgccactgtggaggggtggggggcatcagggcttgtacctgacctggctggtctcctcacctccctttccctgtcctacagctgaaaatgacttctcgacacacctgtttgagcataacctgatttcctttttttttttttttttttgagagacagggtctcactctgtcacccaggctggaggcagtggtgcaatcatagctcactgcagcctcgatctcctgggctcaagtgatcctcccacgtcagcctcctcagtagctgggactacaggtgtgcaccaccactcagctaatttttgtttttgtttctgtttttagaggtaggtggctctcactgtgttgcccaggctagtctcgaactcctggcctcaagttatcctcctgcatcagccctccaaagtgctgggattatacgtgtgaggcacagcacacagcccgatttgcaattttttaaaaattattttattttatttttatttttttctctattgcccaggctggagtgcagtggcgcaatcacgactcactgcaacctccgcctccctggttcaagcgattctcctgcctc[134 bp omitted]gcctcccaaagtgctgggattacaggcatgtgctaccgcgcctggccttaattcattattttaaagagctgcatagtattctgtgttgtggctgtgctcctgtgctctcattcattttatttaaccatgtacctattgctgggtcattcagtttgtttcctaaccccttcaccgcaagcagggctgcaagcaacatcctccaacagatattctcacctcctggagtgactatttctgagacagattcccagggtggaattgctgggtggactggttgtgtgtctgtgtgtgtgtgtgtgtgtgtgtgtgtgtgtgtgttttgtttttgtttttattttttttgagacggattctcgctctattgcctaggctggagtgcaatggcacaatcttggctcactgcaacctccgcttcctgggttcaagcaattctcctgcctcagcctcctgagtagctgagattacaggagggctccaccacacccggctaattttttatattttggtagagatggggtttcaccatgttggccaggctggtctcgaactcctgacctcaagtaatcctcccacctcggcctcccaaagtgttgggattacaagcgtgagacaccacgcctgaccttggtttgtttgtttgtttttttttttgagacagagtttcgctcttgttgcccaggctggagtgcaattgtgcaatctcggctcactgcaacctccacctcccgggttcaagcgattctcctgcctcagcctcccgagtagctgggattacaggcatgtgccatcatgcctggctaattttttgttatttttagttagagatggggtttcaccgtgttagccaggatggtcttgatctcctgacctcaggtgatccacccaccttggcctccaaaagtgctgggattacaggcgtgagccaccacgcccggccacattttttttttttttatttttagaggcagagtctcactctgtcaccctggctggagtgcagtggcgtgatcatggctcactacagcctctacctcccagagtcaagcaaacctcctacctcggcctcctagcagctgggactacaggtggcaccacgatatcgtgctaatttttttttttttttttttggacaaagtcttcctctgtcacccaggctggagtacagtggcatgatctcagctcactgcagcctctgcctcccgagttcaagagattcttgtgcctcagcctcccaactagctgggatcacaggcatgagctgccatgcctggcctggctaatttttttttttttttttga[134 bp omitted]catgcccggctaattttttgtattttagtagagacggggtttcaccatgttagccaggatggtctcgatctcctgaccttgtgatctgcccacctcgacctcctaaacctggctaatttttaaatgttttgtagagatagggtctcgctatgttgcccaggttgaattcctggcttcaagtgatcctcccacctcggcctcccaaagtgttgggattacaggcatgagccaccgcgctcggtcatatatatttttttaatgtcataaattttgaaacactgcttactagtaagaccataacagttcttatttccacaagaagcaagagaaagatcttttcccagcatcctgccctgcagtgggttgcagttctttttaacttttgccaatctgtcaggtgtaaagtgatatccccttgatacccttagcaacacatgtttctaagtcctaaatgtattaatcacgccatactcctttccagggcctaactcaaatttctgacccctttctgagaccctaaaacacacctcctaaacccaacctcagccctgaccagtgacctttgtaccccaaccttcatctcatctgtctaaactttaggctcactcctgtaatcacaacactttgggaggccgaggcgggaggatcacctgaggcctggacaacatagtgagaccctgtctctacaaacaaaataagaaaattagcagggcgtggtggcctgtggctctagtcccaactacttgggaggctgaggtgggaggatcacttgtgcccaggtgttggaggctgcagtgagctatgatcccaccactgcactccagaaagggcgacagagggagactctgtggcttaaaaagaaaaagaaactttagtaatctgctttcctttgagtcctgaaaaccaggaactcagtacctttctatttctttccagatcctctctatcctcccacactccctccaactgacccctccgaccggtccctcttagaggctcacccctcacttccgtctccttccaatgcatctcctctcatttacctccaaatagggcagcccctccctccccatagcagggccctcccaggcaggctcctagtggccggcgccggtggatgggggaggggccaggtcgcctgaggcgggggctaagtttaggcacgctggggggagggggcctccccgcagctgttctggcccgtctggcccctgagtgacagcgctgcctggggccgaggctgggggagggggtcctccctgctcctgggccccaaagtgctggctcgaaggagaagggaccccatgctccctctgggtcctccctatactgcccctcggccccctagccccagcctgcagcgctgcggaagcagatcagtaataaaaatgctccggatgtgcaggagataagggcgagtttggaccccgttccgccgacctcagcccccgtccagcccgttccgcaagcccacctttactccccatatcggctccgagtgagaggctggggacaccgctgcttctcggggattttgcccacttcagtagaacccggaggacaggagtagggggggtggggcccctttggacccagccaatggctgtccacagaggtggggacaattccaaaattggaaccgtcttgtaaacagccaaaagcaatgatgtctttaaccattccatagctgttcctggaggcggagcatattttaaagtaaggctgggtcattttacaactggccaatagatgtggtcaggaaaaagagggtttttgtttgttttttcaaatagagatcgagtctccctatgttgcccaggctggtcttgcactcttggcttcaaaggatcctcccgcctcggcctcccaaagtgtttaggattacaggcatgagccactgcgcccggccaaaaagaagagtttttaaaaggcacagagtttacttataaatattctacggccacatctaaataaggagagaactgtattttttcagggatttggcctgtccaaaatcagccactaggaggag[144 bp omitted]gcctcccgagtacagacggggtttcaccatgttggccaggctgatctcgaactcctcacctcaagtgatccgcccgcctcggcctcccaaagggctgggattacaggcatgagccaccgcgcccggccggggaaatttttttaaaaagcggagtttatcacgtctagccagatgtgatatcacgtctatctcttcccttttccactatgtactgttcctttgcgaggttggtccctttaattcaaaatcctctcaccttttgccttctgtgggccaatgcagcatcttcatacacgttgcttacctagaaggcgtggctccaccgtgaattctaattggtccgtgctatcgaggcactgtccccttactggctctcgctccagtggcccccactgcttttcttcctcttccagcaatggctcttcgggcccagagttcgaatctcgcgatcgggatggggacggagtaccggcctggggtgtcccagagcccggactgagctggggagtcaagacctcgggcgatgagggctgagcaagtcggagtcgtaggtccagttctgatacggtagagagaggaggccgtgagctttcttcttggaggtgccccaaggagaaaccacccacccctcttggctttggtcccagcacctcggacatctcaccttccccagcttctcctgtctccaatctgttgggttcttggggttcttcgtcttccagcggggtggagctgctggtggaagagtcctccccggatcccgttccccgggccacccagcccagatggtccaaccgaagcctcaggtcttccagagggcgctcggatggaggcgcggtgtcaggatcaccccgtcgtccaggctccggggattggctcaggctggggatgctctccaagctgtcgcccaggctgggctgagggtgctggtctcgtggttccgagactgagcggccctgggggcgggggcggcgggcagttgaatccctgcggcccccggagcccactacaccatcaaaggcgatgtaggagaaggtcagctcccggggggtgccccagtcctgcgacgtggtctcctcctcgtcctcctctgagaattcccgggctgtgtgcagctctcgaaaatcagagtcgtcgttccctcctgcagtgggtgaaggagagccttgtttccctcagcaggtccctgagctgcccagccctgagccccttcacatgctccccaccacttaccttctgtggaatcaggagttgaggaggctgtagacggagcttcttctgcgagagggaaagaatcgaagactcttagaagcttagactgtccgaatcacagaagtgtcccagtcctggaatcttagaatatttgaatcacgggatttttagaacattctgcacacagactctaaaacctagcatcactgcctgatgaagctcagagtctttgaagtccaaatccaggaatcttaatcttagagtcttcaaagtaggaatcttaggaggtttcaattcattcattcgttcaacaaccacttattgagcacctactatgtgccaggcactgttctaggtcctggggatacagctgtgaagaaaacagacaaaatccctgccctcctagagctgacactctttgggatagacaaacaataaacaagtgaatatatgacgtcgggtgcagatgagcatagggagcaaagtaaagaagggtaggggaagagaaagtgaaggggtgctgtttctcatagggtggtcaagaaggcttctctgataagatgacgtttgagcagagatctgaaggaagtgaggaagccatgcagatgttcagggacgtcttccaggtagagaagaaagccagtgcaaaggccctgagccaggcaccatgcttggcatctgaggaactgagaggtgcgaagatatgactggagaagagtgactgaggaggagaggagtgggaggtgagaacagagaggtaagggcggtggggagagacagacgaggtggtcctccctttgtaatctgaagttaacgacaagatcatagaatgttgggatgatactcgaaaatgctgaaatcaccaattcttagaattttggcatctggacacgcgagacatggaaatggctagatctaagggtgttgaaatccccagctgtcagaacccccatgtgtgggacagagaacggtagacatggactgttatagctgtgagctcagagattgtgaggctaggcgttttcagctgggaatccagccccttagagctagttcagagctttgcacatagatgatgctcaatgcggtttggaaattgaaatctgacgccctgtgccctcacctcgtttcctcagctggggaataggaggcctggaatggtgtgggtcttccccaggattaccattaaccagtggtaaagaccgctaagaacccatgagtccttgcccccaaaccacggatggctgttttcccgggacagggttggacagtttgggcgaggtcggggctgcctcttggacagaaaacggggatgggatgcgaaggcaagtgattgggagccagacccctgttttccatcctggctctaccctccgttcaaccccctccccgccagctgcggccagcaccagagccaggggacagctccccgcgcgcgtcctcgctcccgggcggggccgggcggtacgtcccagagcgcagcgcgccccccgcctgctgtctcagtgccccctcacctccgccctgtttcgtccaggtcctccgggtcaggctacccccgtcgccgccagagcgcgggggaggggagagcttcctttgtctcctatgcctcctccccccatcccggctctcctgcgggcaagcgccgaggggacaccggggagtaccccacctgaacctctggggcccacaccaggccccagtcttcctctactcactgcagtgggcgaagaccggcaggacctgccccatggcccccctcgggcctgcatcgggacccccgcccactccggctgtgccgccctgggcccggggtcgcgggcgctcatctccgccgcgcccacgacgccgctgccattctcgccgcctcctcctcccgggctgctccagccgccgccgccgccgccgccgccgccgccgccctggtgctcggctcggcgggggcgggcggggccgaggtggggaaggcactgcagcgcgcggccgggggcggggccagaagacgggcggggcggtaccagagggagggtgaggggcggggaaacgccgaggatcaggcggaggggcgtggccttcttactaaaggggcggaaccaagagggtgggctacggagccaggaaggaggggaaagcggcctgaagggcggggcctagatcgcagagggcgcagcctttaggggaagagggaaggaggcctggagtctggcgagggacttgggagaggatggtgaacgagccacggcagagaggatgagagcgtggatccctgggtgggttggggtggtgctcggggtgccattgaggagggggtggaaagattctaatgctctgaggtagggtccgagcctagatttgcagagggagcgagaaagggggccgaatgaaacgattcagaaacttttggggcacgcggaggagctcaaacgtgggcagggctaaagcaacagggaattattcaaatataactgggtggggtcggattccaggcgattccaggtctgcgaaaattagaagggtctggagctgtgtgcctgaatcctggatgggcggggcctggaagagaaaataagcgaagccccagaggggaggggtcgaactaaaaacagtaaagaaaaaaaaaatatgtatatatatatatatatatatatatatatatatatatatatatctttttgagacagggtctcgctctgttgcccaggctggagtgcagtgatacgatcacggctcactgcagcctcgacctcccgggctcaggtgatcctcccacctaagcctcctgagtagctgggatcacaggtgtgttccaccgcgcctggctaaatgttaatttttgtagagacggggtctcgctatgtttcccaggctggtctcaaactcctgggcttaagcgatccgcctgcctcggcctccctaagtgctggggttataggcgtgagccaccgcgcccggccaagtatggtatttacaggttttgaggctgggggctgtaccactgaggtgggaggagcttggactgagtgttgtgttgagaacacagattctagaattagtttccctggaacaccggttacttctgtgactctgtttcttcttccatatgtaaactggagatgatgatgtataacagtgtgtgacacattagtactatgtaatagtttgccactggtacagtattatcttttttctttttttttcctgattcagatcccaaaccccgctttgtaggtgcaggaaacaggagacccagaagtgtaattccttctagtgacccgcctaaagagcaggtcaaaggacaggaaggagatttagatggtttaaaatctcacagcggaggggattaatggagggggcgggcaggtgtacagggtggagccttcctgatcccagggctgaaggatggcggtcctggcccgccagctgcagcgtctcctctggaccgcttgcaagaaaaaggagagggagaaggaggggagggaggaagaggaggaggaggaggcggggcgcagggcccccgaagggcctcggtctctgttgacagcgccgcgccgcgcccagcggccgcacgggggtgccgaggcgtctgggggcctgcgcttcggggcgagcgcagcgcaaggctggcgcgcgcgcatggaggatgctcactgcacttggctttcgttacctggtctgcccccgggctgggccttgtttgccgtcctcgacggccacggtggggctcgagctgcccgcttcggtgcacgccatttgccaggccatgtgctccaggagctgggcccggagcctagcgagcccgagggcgtgcgcgaggcgctgcgccgagccttcttgagcgccgacgagcgcctgcgctccctctggccccgcgtggaaacgggcggctgcacggccgtggtgttgctggtctccccgcggtttctgtacctggcgcactgcggtgactcccgcgcggtgctgagccgcgctggcgccgtggccttcagcacagaggaccaccggccccttcgaccccgggaacgcgagcgcatccacgccgctggcggcaccatccgccgccgccgcgtcgagggctctctggccgtgtcgcgagcgttgggcgactttacctacaaggaggctccggggaggccccccgagctacagctcgtttctgcggagccagaggtggccgcactggcacgccaggctgaggacgagttcatgctcctggcctctgatggcgtctgggacactgtgtctggtgctgccctggcgggactggtggcttcacgcctccgcttgggcctggccccagagcttctctgcgcgcagctgttggacacgtgtctgtgcaaggtcctgggggcgtggcgtggtacctttggggcttggtgcagcagagggagagagcctcggggttttggggaggagggctttgatagagaggcaagagtaaagctagcaaaggaggggataggactcaagcgaagggcgtggcctgaagtgggcagggccaaaatacaggggcggagcctgagggatgctttgaggcacgggagagttagtggaagggacttaagagaaagggcgtggtcttttggaaaggggcgattctgggtcgtaggagccgggccggaagtattgattagtgctggaaggtggaagagcaggtaaacatcagagcgggcggagctttagggaaaaggcattgttctctcaattgggagcgcctaggaccgggtttggtcccagtaagagaggattggcaggtgggtgggacgcgaaagaaatgggcataagtagaatgaagtgggggacttgaacctggggattgttgggaagctctgccttggactctcccccaccgggctcctttttctccaccggcttcagggcagcctggacaacatgacctgcatcctggtctgcttccctggggcccctaggccttctgaggaggcgatcaggagggagctagcactggacgcagccctgggctgcagaatcgctggtgagcagactctgggggcccagctggaggggtggttggccagtgaaggctgtgccataactttttctttttttctttttttttttgagatggagtcttgctctgtctcctaggctggagtgcagtggcgtgatcttggctcactgcaacctctgccttccgggttcaagcgattctcctgcctcagcctcctgagtagctgggattacaggcatgcacaatcacacccagctaatttttgtattgttagtatagacggggtttcacgatgttgtccaggctggtctcgaacccctggcctcaagtgatccgcccgccttggtctcccaaagtgctgggattacaggcgtgcgccactgtgcccagcctaactcttgactctttctcagaactgtgtgcctctgctcagaagccccccagcctgaacacagttttcaggactctggcctcagaggacatcccagatttacctcctgggggagggctggactgcaagtgagttggggtgaggaagggtggggtggaatgagggtggggtggaaggaggagagtcccctcctgagggccttcctgtgctctccagggccactgtcattgctgaagtttattctcagatctgccaggtctcagaagagtgcggagaggtaaggatcctgtgttctccagtgtttctcttaggaggggacgcccccccgcccacccctcttagtgacagggaaattgaagccagtgaggataagggatttgcctgatatattttattcctcttttctcttctttctttctctttttttcttttcttccttcctttcttttctctctctctttttttttagactgggtctcactatgttgcccaggctggtctcaaactcctgggctcaagggatcctcctgctttggcctcccaaagtgctgggattacaggcgggagccactgcaacccagccagcttgctatattaatacattcctactcccagccctgaagcattgtgcaaggcatgaggagggagacgcagatgcagagaagagactgtgattcccctccaagaaatgtgagccggcaacgctctgcagtgccccatcagcccaagtgcttcccacatccaagaataagatggaaacattcagggaatgctaatgaccaattctaaggcctagacgcacagcagataccatcaggacatacatgagtatgatccaggtcttagacaagagaagctgtaatggggcccagatagctaaggagaatttggagatatccaaagatgtatagtggtggaccaaggcatggagtggcatcagggaagaaatgggagggaggaagctgggtttagagccccaaggcctttgcatggcagaggtgggagtttggtgattatcatgttgatgagggaggattgttgacaatttctcagtagctgaaggaggtatttgtcagttttctttgagtcgtgagagatggaagcccaattcaagctgggaaaacaaaacagggaatttactgggccatgtaattgaagagtttagagtcttaaggcatggctgcatctagttgtcagatgatgtcatcatgaatggtctctttttattttctccgagttggcttcattacctttcagggtctcctcctaaggtagcggagacttgcagctccaggcttacaccccagcagcctgtcctccccagtggagaaagtttgccaatttccccggagttgcagcagtggtctttgggggctggttctcattggccacaccaggtcacatgctgaccagtcactgtgtctgattggccaggctggggtcgcacttggggttggggtccactccattcaaaccttaatggattgtgagatgggatatggtggtccctcaaaggaaaaggaagaggtgccaggagacaagacagaatttctcattaccttctcccacattttgtgttacagaaggggcaggatggggctgggaagtccaaccccacgcatttgggctcagccttggacatggaggcctgacagctgttgtcctttggggatcctttgcttctctggggcctcaacagaactaaagaagaaaaccgaccctttccccaactacatgtaccagcggaaggaaggaaggccaatgtaggaacccaaaatgcttatttcttcttctcttacttccctctcacagaaaagtcttacgaatggggaaattccaccaacatccagaccaaaaagaaaaaagcccaaatcgaaaaaaaaaaaaaaaaaaaaaaaaaacaaaaaaacccaaccaaatgtttttgaaatattcagagccgaacagattctgagagataacccagtccaataacctctttccttcttattactcatctgtttttgaggggaagtagagttttgattattaaactttatttacataagtgattccaaatacattttcttgtaaaaaacaagaagacatgttttgcctagtctgttagcaaatacgttacagggcacctgctgtgtgccaggtcttagcctcacagtcatgaaccaggctgacccaccaagatccttgccactgtggggctgacctcttggtcaggagacgcagcaaacaagggaatcaataaataaagtcatctcgccaggcgcagtggtccacatctgtaatctcagcacttgggggagtctgaggtgggaggatcacttgagcccaagagttcgagaccagcctgggcaacatagcaagatgcaatctgtaatttttttttttttttttttttttgagacggagtctcgctctgtcacccaggctggagtgcaagggtgctctctcggctcactgcaagctccgcctcccgggttcatgccattctcccgcccagtctgtaattaatactaaaaaaatgaagtcatcttgcacactgacaagtgtcacgaagaaaataaaacaggaggatgtgttgagaaaatgactaggggagctacttcgggttttttactttttccaatttttaaaattttgatttatttaattcaggtagttttgaatgggtaataaattcacttggtttgaaatgcaaagagtgcaagatggcatacaatgaagtctttctctatccctctcacacttcagccactcaattttccgtggtgggggaggtggcttttgaaacaggggaatcaggaaaggtctctgaggaggggacagttgagcagagacctgacagagaagagtcagctccgcaaataccccaaagagtgttctaaggcagagggaacaatcagtatgaaggcttagaagcaggataaaatttcccccctttttttttttttttttgagacagagttttcactcttgttgcccaggctggagtgcaatggtgcaatctcggctcactgcaacctccgcctcctgggttcaagtgattctcctgcctcagcctcccaagtagctgggattacaggcacgtgccaccacaccaggctaactttttgtatttactacagacagggtttcaccatgttagtcaggctggtctcgaactcctgaccttaggtgatccacccaactcggcctcccaaaatgttgggattacaggcatgagccagccaccaggtccggccaaatttggcattttcaagacagacttgagacctcccaagtgcggtggctcacacttgtaatcccagcactttgggaggccgaggcagcttgattccaggaattcgagaccagcatgggcaacatagcaaaaccttgtctctacaaaaaaaaaaaaagatctctgtgaccaccaaattaaccccacactctctatctcactggtaacccttgcaatgagtttaaagtggactttttacatgtattaatatatggtattctgggtgtttccttgatttttttcattcccttcgtatctctggcaactttttatccacttaatggatgttttcattctatgtcacccacgtcatttacacacttcatgccacccgtttttttaagagacaaggtctaagtctgtatcccaagctggagtataatggcgcaatcatcgctcaccacagcctcgaactcctgggctcaagcaatcctcctacctcatcttcccaagtagctgggaccacagatggatgataccacacccagttaattttttttttttttttagagatggggtctcggccaggcgcagtggctcacacgtgtaatcccaccactttgggaggcccaggtgggcagatcttctgaggtcaggagttcgagaccagcctgaccaacatggagaaaccccatctctactaaaaaatgcaaaaattagctgggcttggtggtgcatgcctgtaatcccagctacttgggaggctgaggcaggagaatcgcttgaacccaggaggtggaggttgcagtgagccgagattgcgccattgaactctagcctgggaaacaagaatgaaactctgtctcaaaaaaaaaaaaaaaaaaaagagagaaatggggcctcactatgttgtccaggctggtctcaaactccctgacctcaagtgatcctcctgccttggcttctcaaagcaccaaagcactgggattacaggcatgacacaccttgcccagtccacacctccttaagttgctgctcactccgtgcttcagaaaaggatgtccaagggtttcactattccctgccctcatcttttttttgttttgttttgtttaattttttttgaggagtcttgctctgtctcccaggctggagtgtagtgtcacgatcttggctcactgcaacctccgcctccggggttcaagtgatcctcccacctcagcccctcagccacccaagtagctgggattacaggtgtgtgccaccatgcctggttaattttttgtttttggtaga[153 bp omitted]ttcttgctctcacatcactgctaccgtaaagatcgttatgtacatatgcaagcgttctcttacacaggggtcttgctacctgttttgtacagcacttaagctaagaagagttttttttacagtttttaagccttgtaagaaaaaagaaaaactgaagagtgtgtaaaccagaccctatgtctagcatatctaaaatatttcctatttgaacttttacagaaaatgtttgccggctgggcctggtgactcacacctccaatcccagcactttgggaggctgagccaggctgatcactttagcccaggagtttgagaccagcctgggcaacacagctaaaccctgtctctacaaaaaattagcctggcatggtggtgtggacctacagtcccagctactcagtgggctgaggttagaggatcgaatgagccctggttatgctactgcgctccggcatgggcaacaaagaccctgtctccaacaaacaaacaaacaaaaaaccatgtttgctgactgttgttgtagtgtaggtggcacccagaaatgccacccctcctatgtcacagatgggaaagctgagacccagagaggagaacacagttacccaaggtcacactgaactggtaactcattcaactaggtaagtttgttgagctgctgagccgggcgggcctggctggggtgagtgaggtccagaaattgattaagtcaactgggtgcagtggctcatgcctgtaatcctagcactttgggagactgaggcaggcagatcacctgaggtcataagtttgagaccagcctggccaacatggtgaaatcccatctctactaaaaatacaaaaattagttgggcttggtggcccgtgcctgtaatcccagctactttaggagggtgaggcaggagaattgcttgaacccaggagggggaggttgcagtaagcggggatcgagccagcgccctccagcctgggtgacagcgagagactacatctcaaaaaaaaaaaaagaaaaaaagaaatttagtctacccattctcccagacaactcagcctgaggaaacacactgagaaacaatgataacctccgaggaacagggttcaaggtctcccagagtggggtggagaaggggaggggaattaatgtcaaagcttggcctggaaggatgacgtgctccccaggtaaaggaggtcaggacaacatcaacatccggacatgggactcggcttggacatacgctggaaaagtggattctctcacatagtcagctggccctgagaattgttggttttacactcagaccttggtggctttccgggttctgggggctcaggcaagagggccataggccagattcattccctgtctccaggcctcagtttacccgtgtgtaaatgtggaactaactgatttcccagggctcgggcgcctcacccgggccaggtggcgctctacccaaggggcgcgaccaaatcagtgacgtcactcggggcggggccggcaagacacgctgcggaagcctcagagggtgtctgggctcagcccggagccggcgtgtgggggcgggggctcccgggagggtctcctcacctccgggccctcctgagggctgggatgatcctgctgtcctccgcaggcgaaactgagtcagagcggggcgtgcgtgggccggaggctttacacaccaaagaagccggcgcctcctgcccaccccgggcgaatgccgggccccccactcccgcactcctcgccagtccccacctccaccccaccccacccccgaccctgcggctgtgagtcagcgaccgaccgcgcccccttggcccacttcctcctcaccttcccggggcgggcggggtggggtgagaggggttgggccctactcccccgacttccactcccgtgcgggtgggggtctcgcccccttagtaacctctccgaaattgacagaagagaaacgctggggaggggcggtgttccgaagatgggatttcagggagaaaatctgagaccacttgcttaacttgagggtcctcctcgacccccaaaattgagcggagtacgagatggagaagtcgatggggaaagaaatcgcgccccttccgagaccctcctcagaattcccacagtgggagcgaactaggaagcaagggaggtccccttccccttcaccaacttgcccctcaggtgggggtgattcccagggtgcacccctgggctacaacattggggagaggagcgagatcgcggaagccgagggtgcagagttgcccttttaagcgccctccaccccctcgcctggaggcgcacgcggcccctttaaggcgcggggcattgtgggtgcggggagtggaattttggaacgaaatgtaacgaagagaagtacagtagtaagagtaacactgtagccgccaccggcaaggggtgcgcgctggggagcggacgctgcatcccctttctgctgcaggaacctctcatcagaccgcctgagggaagcggcgcccggagacccgccccggcccggtccacattctccccaggaagccggactctatggggcgggaccctgggggagcctgagccgagcccggagccagccccgaacccctgaacctccagccaggggcgccccgggagcagccagcccgtgggcgagccgcccgcccgccgagcagccatgaggtgagccggacctgccccccgacccgtccccgcccgggcgggctccgcgccccgcctttgtccccctcccccccagctagctccgggctggaatttggggacagatccttgggagcctcggatttgagctgaatccccttggacgcgccccagaaccgtcgatcacttctccacgactgactccccaagctcggggggtggtggcggtgaggttctcctgggagccctcaagatttgggggcgctcggaggactcccgaattgttaagactttttttagaggacctcaaagttggcagcgactccccgcagggatgccaggattgaggcagggctcagactctcctccccctccccccagacttcagctcgaggtccgggaaggattgtgggggaccgatttgggataccctgggacttggaagagagactgagactcagaccctgggtgtgcaggtcccccgtttacttggtgctggaaaaagtctccccaagtgggaccgcgctccataacttcgggggtacttcttaatcccctggattttgggggtcacttaggtcttcctgtggaggaggctggtgtgaaccgatccagggacctggacgcagcctccagagtctggtgggaccccccccttccccgtcgctccgcacacaatctgcttaactggccgtgcctaggaccgagcgggcgctcggagcagagggcggctccccgcctccggccataagggcggcccggctcccccacctgcgcggccctggagagggagggggcgcggcagctgggggaagggggcctttgtcttcctgactcacctgtcgagacagctggtgtggggggcgggcaccaagcgctgtaggccggctgccttccccaccacggcccctccccctttgctcaccgtccccctatccacccggagccttggggttggaggagggggagctggaaagcttcaaggtcatagccctcttccctagggacccaggcttcccagataattccagctatcttcccaggaatttaatcctgggggtggcggcccaagggacccagggatttggtctggccggggcctcccccgaactcctgggctcacctgagggcggggccagtgtgggcaggggggcccaaccatcccccctattcttccctcccctggccccccataatctctcccatggggccagagcctgacaatactatctcccttcctctactctctctgggacttcctgccccaaagcccccagcctgagcagggaggcccctggggacggttggggattaaccccgtggtgcccacatcccccgcatttcctgaacccctgccctttgacatcggagtggcgtggcattcctttttatgaccactagagaatccccctcccgcgtttgttccttctgatgtgaaaggcatggctggaaaatttggagcaaggaggacacccacagataccctcaagacttcctgcctatccgctccccattatagcaacatcccttccaagtccgccctggagaggggtcagtttagggagcgtcgctctcttccttcgccctcttcctccgggactcttctctccccttgccccccagccccgcccctccaccccccctcgcgtttccggtcccaggctcggtggaaggcggatggcggatgtccgagttagtgctgcctcactcactgcaaccgtaaaagggcaggagcggtgtctgggccggccccctgtcctccccaccaccaccaccaccaccagcaccagccctggaagccctggccctcccacaaggcccacctcttgctgtggtggtggccaagcatcccgtcttgtgggggtgctggggtggggtgcggtgcagaaatgaccagatgcctgtcccaccaaaaggccactcccacctttccagggggtctcccctgcaggtggtcacacccgacttcctgggctgtgcctcttctccaaggacagccagaattcaaaacccatgcccctattacccagctggggaaactgaggctcaaagagaaaaagacatggccaagatccctcagaaattcctaggcaacgttggaggggtggaggagcctaggatcctctgatttctggctggtttggctggggacagtcctgggggcagttggaagagaggatgttaagatggaaaattacaagatatagttctttttctcccagtttgacaaatatttgttgagtgttggctgtgtccgggactggagctggggtgctgggaagacagagaagcgaggcagaggtctagaatctcagggcagaagggacttggggagaactggggtccatttctttcttcttccaataatagctatttttatttttaaaaaataagagaccatttgatcaagcatctattttatgtggggcatttttgtgcctgacagcaattctggctggtttttttgttggtttgtttgtttgttttgagacggaaattttgctcttgttgcccaggctgttgtgaaatggcatgatctcggctcactgcaacctccgtctcctgggttcaagcgattctcctcctcaaccttccgagtagctgggactacaggtgcctgccaccatgcccggctaatttttatatttttagtagagatagggtttcaccgtgatggccaggctggtctcgaactcttaacctcaggtgatccacccgcctcgacctcctaaagtgttattattacagacgtcagccaccacacctggcccctcatggcagttcgaacaatgatactattacaaccttgtggcctccccaccccggtactcagtttatagatggggaaactgaggcacaggaaagttaggcaaggtgcctattaaactcaaacagggccaggcgccggggctcatgcctgtaatcctaacactttgggaggccaaggcagaaggatcgcttgagcccaggagtttgagaacagcctgggcaatatggtgtaaccccgtctctacaaaatatacaaaaattagctgggtgtggtggcatgcgcctgtagttccagctactctggaggctgaggcgagaggatcgtttgagctggggaggttgaggccgcaatgagtcatattcttgccactgcactccagcctgggtgacaaagtgagaccctgtctcaaaaaaaaaaaaaaaatagagataacatgctttccgtgttcttaatgaagaaaaagaaaaaaaaaaaggaacgtgctttcactgtgaaaactcttaagataattcagataagccaaatgaaaccgaagctgcaacatttatcttcctattcacttatgggaaactgaggcccaccaggaggaagggactagagtagccccatccccgacaaaagaagatttgtcgtttggaagggtggtgtatatgtatcataggttttatggtataaggagggtatgggctaagtcttgggttcaggggacagtgaagggaagggtaagactgcaagttttgtgaaaaccggattcaccatgcttgattacctctggtgatgggaagctctctccttcatgtggagcgtgtaccaagttacagttcctgcgtttagggctttttgtccattatctcttttaatccttacaatgaacccagtgagttattgtttccagggctggaaactgagtttcagagaggcaaagccacacaacaaggaggcaacttgaaccgtcttttcatccgccatgtgctagagttttccaaaatgtggggacttgcagggaggagtgggtcctgggctggctggaaaattaaagtgttctcatgtccaatggagggttctagacttcgggaaaacacactggaaatgggcagaactcctttccatctcacagcccccgcacccccgttttatggctatgggattttcgttctggcttttgtgtagtttacagttttatttattgaacttaagtagtgagttaggtttttataggtaatttcaacccatgataagaaaacaaataataagcagtttgaaatacttactgaaattattgaaatggtggctgggcctggtggcttatgcctgtaatcccagcactttgggaggtcgaggcaggcagatcacctgaggtcaggagtttgaggccagcctggccaatgtggcaaacgcccaaaccccatctctactgaaaatagaaacattagcctggcgtggtggcacacgtttgtaatcccggacactcagaaggctgaggcaggagaatcgcttgaactcgggaagtggaggctgggaggctgaggcaggagaattgcttgaacctgggaggtggaggctgcagtaagctgagattacaccactgccagcctgggtgcagagtgagagactctgtctcaaaagataaatggtacaaaatatttgtttcttccctccccagttcctgagttcccctcaatggaggcagccacagttagtgtcttgggaaacagtctctgcatatatcaccactctgagtgca[137 bp omitted]cctcctgagtagctggaattacaggcacgcgccaccacgcccagcaaatttttctatttttagtagagacagggtttcaccatgttggtcaggctggtctcaaactcctgacatcaagaggtccgcctgcttcggcctcccaaagtgctgggattacaggcttgagccactgcgcctagcctaccttttttgtttgtttgtttttgtttttgagacggagtcttgctctgtcccccaggctggggtgcagtggcgtgatcttggctcactgcaacctccgcctcctgggttcacgtgattctcctgcctc[131 bp omitted]cttggcctcccaaagtgctgggattacaggcatgagccaccgcacccgaccttttttttggttttgtaaagcctctgatcaacactaccttgtactttggcttttaaaaatttcaatttagctctgcttcttcatctttaaatgaagttaagaacttgtgggaacttcgtttcaactatgagcccctctgcttacttgctgtgtgatctggggcaagtgccttcactcctctgtgcctgcaattcccccttgtcaaaagggtgagcgtcagagcctatcccatgaggttgtagagtcatgcagcagggaaattggtgtcaagcaccaagaagagtgtctgggacccaggctgactgagaaatgttaggtgtcctaggtaaaagtttgcctttttttgtgagggagtcttgctctgtgagggagtcttgctctgttgcccaggctggagtgcaagtgacctgaacaaggctcactgcagcctcatcctcttggactcaagtgatcctcctgcctcaccctcctgagtagctgggactacaggcaagcgccaccacacccagctaattttaaa[142 bp omitted]tgggttcagtgattcccctgcctcagcctcctgggtagctgggattacaggcatgagccaccatgcctggctaatttttgtatttttagtaggcatagggtttcaccatgttggccaggctggtgtcgaactcttgacctcaagagatccacctgctttggcctcccaaagttctgggattacaggcataagccaccacacccagc[137 bp omitted]tccctactatgtgttggacgccattctaggttctggggacacagcagtgaacaactgggacacaaatttctgcctttttggcagcggagacagacaaatattgtgttgggcaggggtcactgctatgaaatgtgcagcaggggatgaaaaggagagaagcgtttccagctaagggagtgagggacggcttcttggaaggggtgacatctaaggagagacctgaaagtggggagaggctaggcctgaggaagaagcagcacacaggcccgaggcaggaatgtgtctggcctgcgggaagagcagcatgggggtaggaggtctagggtctggaacagagtccccaagggacagtggagcgggaagaaatgagatctgaggacacacagatcacggaggccctggagagaacttggcattgattccgtaggagcctggagccttcaagaagaagaagagacatcccaccttgtaggtttttgttagtttgttttgttttttagagatggggggtctcactgtgttgcccaggctggtcttgaacttctggactaaagcaatcctcccgcctcggcctctcaaagtgctgggattacaggcatgagccaccgttccccgccccacctcgtgttttaacaggatccttctgttacaatgggtatagtgttccctggagaggggcaagaccaccccttggtcacccagcaggcgccctgttctccggccagtccagagcctcagtagggcagggctgcctgggagagcaaagtgcagccagggcggggcagcagcagccccgggctcctggccagagtcggccctgggtgtgggtggcaggtgtgggtgaggccgaggccttaaccctgccttgccaggggcagcaggagccagaaacagcccccgaggctgtgtttgtctggaaagggcacctggtgtttgggtggggcccacacagttcccggtggttaaggcttggaagcctgaattcacatcttcactctattcctcagtagctgtgtgactgtgggcaagtcactcaacctctctgggcctctagtcctcacctgcaaaattagaatgagtggctctctggataagctgcagtgagaataaaatgagtgactttgggggaggggcttaaggcccctgatccacctgaaatgcctagtaagagggagatggcacaattaggtaaatttgagggtccctaccccaggtccctacccacagctgagtctgcctagggactttccctgccctgacttcccagcatcagtgtcacacccagcccccagccctcctagagacagaggctttgcggggggtgtctaatttctgtccccggaaacctctgaccaccaacttccccatttcaggaaaaagcctggtgtgggtggggtggggaggagaccagtgcttccccttcccctgtgtgaccttgggcaagtcacttcctgtttgagttcctgtctaggcctgagtttcctcactgggggagaggggattgaacctcccagaggggctggtgggagggtcccgagggttgtagctgtcccgggccccagtggtgcccatgagagggatgttgacagttactgagctctcggcgtgtgctggacgctgtaccaagcacttagctttttttcttttttttgaaacagagtttcactctgtcgcccaggctggagtgcaatggcgtgatctcagctcactgcggcctccacctcctgggttcaagcgattctcctgcgtcagcctcctgagtagctcagactacaggtgcacaccaccacgcccagctaatctttgtacgtttttgtagagacgggatttcaccatgttgcccaggctggtctcgaacacctgagctcaagcgatccattcacctcagcttcccaacatgctgtaattacaggcgtgagccaccacacccggctgtaccaagccctttaggtgcccagattcatgtgcccctcccccactgccctggaggtggggactgtcattttcccagttcacaggcaagaagaggtcttgagtgggaaggtcatgtgcctgagtcacatgaagtaggtggctcagtggggatttgaacccaggtctggggatatcagctcctgaactctgcaccagtttactgacacctcccacccaggctaagtcagacgttgccttttccaggaagtcctgcctgactctccaggctggggcaggcgttccttcagggtacccccagaccctgggctccttggtcctaaacctgggttggtaccgtctggggacagctgtgtctcccacactggactgtgagccccaggagggtggtgccggagctgtctgggtcactgctgtgtcttcatccccagccccacccaatataggccagacacagagcagggagtatctggggaatggccgctagtgccctggggagccaggcgaggggtgggcagcgggaagtccctttggaggaagagctcagaggtctgggatgggtccccaacctgctgcaggcctcacacttcccctcccaagcctcagcttcttcctgagcaggcagtggtggaggggggtgcgtagagatagggaaactgaggtcaggcaggggctggtccctagtgcagctctgggctcttggcctccttctggcccctctgtcttccctcctgccctctgctctgctaacccgcatccccccactggcattggcctcggcctcttacacccctcagcctgtctctccatctttatcttttccttcttattagttttgttgtgttgtgttttttatttttcattaaaaaagtttttttgtggactgggtgtggtggctcacccctgtaatcccagcactttgtggggctgaggcaaatggatcacttgagcccaggagttcgagaccagtctggccaacatggtgaaacctcgtctctactaaaaatacaaaaaattagctgggcttggtggtgcatgcctgtgattccagctactcaggaggctgaggcggagaatggcttgaac[135 bp omitted]ctgaagtgggaggatcgcttgagctcaggaggtcgaggccacattccaacctgggtgacagagagcaagactctgtctcaaaaacaaaaataaaaataataataataattattattattagagatggggtctcactatgttgcccaggctgctctgaaatgcttgggctcaagtgatcctcctgcctcaacctccaaagtgctgggattacaggtgtgagacaccacgccaagaccatctttatctctttctgtgtctgcctcttcctccaggtcccctgtctgcccatcctttttccccacccctcccccatctgttcatctgtctgtctgccttcagtctgtctctcctctttgtcaacccgactctccctttcccacctctctctgcgtctgtctcttgcatctcgtttgtgtgtttgcctgtctctcctgatctgattttctctcctgatctgtctcccccgtctccttctgtccacgtggctcctgcctccctctgtgtcactctcttccttccacacactgtctttgtcccttggaatctcccaggagagacccagataagaaggtgaccggcccctctcccttttcctcccgcctgcagcgagacggtcatctgttccagccgggccactgtgatgctttatgatgatggcaacaagcgatggctccctgctggcacgggtccccaggccttcagccgcgtccagatctaccacaaccccacggccaattcctttcgcgtcgtgggccggaagatgcagcccgaccagcaggtgcagcttcccgccggccccctctgtgggctgaacccctacccgccccacccctgcgcccgccgcccctcacccccctttcccctcccaccaggtggtcatcaactgtgccatcgtccggggtgtcaagtataaccaggccacccccaacttccatcagtggcgcgacgctcgccaggtctggggcctcaacttcggcagcaaggaggatgcggcccagtttgccgccggcatggccagtgccctagaggcgttggaaggtcagaaatggcggcgggcaaaggggaccagtgaatgcggctgtgtggcctggggctgccgctttaccctgctgggacttggtttactcgtcggtaaaatagagcgaattcattgttatcatggaaaattatcactagcattttgtgcattccagtgtgaccgtgtgcacctatgtgtaaaatgcaccattggcccggcgccgtggctcatgcctgtaatctcagcactttgggaggccgaggcacacggattacctgaggtcaggagtttcaccgtgcccaacatggtgaaattgcgtctctattaaaattcaaaaattagctgggcgtggtggtgcgcgcctgtaatcccagctattcgggatgctgagggacgagaagtgtttgaacccaggagatagaggttgcagtgagccgagatcaggccactgcacttcagcctggcgacagagcaagattccgtctcagaaagaaaacaaacacaaaaaaaatgcacgattactcagggatcagtactccatgaactttacacaggcacactcccgggaaaccacctcccagatcaagacataggtaggtcctgccccagaaacaggatctcgctctgttgcccaggctggtgtgcactggcacaatcatggctctctgcagccttcacctcctgggctcaagtgatcctcttgcctcagcctcctaagtagctgggaatacaggtgtgcaccaccatacttggctctttttttgttttgttttttgagacagagtcttgctctgtcacccaggctggagtgcagtggtgcaacctcagctcactgcaacctccacctcccgggttcgcgtgattctcgtgcctcagcctcctgagtagctgggattacaggcatgtgccaccatgcccaagctatttttttgtattttgtttttatttttatttttttgagacagagtctcactctgttgcccaggctggagtgcagtggcacgatattgcctcactgcaacctccgcctcccgggttcaagcgattctcctgccctagcctcccgagtagctgggactataggcgtgagccaccacacccgggtaattttttgtatctttagtagagacaaggtttcaccgtgttagccaggatggtctctatctcctgaccttgtgatccgcccgcctaggcctcccagagtgctgggattacaggcatgagacaccatgcccggcccttgtattttagtagagaaggggtttcaccatattggccaggctggtttcaaactcctggcctcaagtgatccacctgcctctgcctcccaaagtgctgggattataagtgtgagccaccatgtctggccacctggatcatttcaaattttttttttttttttactttttgtggagatggtctacaggctggtcttgaactcctgggctcaagtgatcctcccacttcagcctcctaaagtgctgggattacaggcatgagccactacacccagcccagttgctttttttttttttttttggagacggagtctcgctctgtccccaggttggagtgcagtggcgcgatctccgctcgctgcaagctctgcctcccgggtaaatgccattctcctgcctcagcctcccgagtagctgggactacaggcacccgccac[138 bp omitted]cccggccttttttttttttttttttttttttttttaatatggagtctcactctgtctctcaggctggagtgcagtggtgtgatctcagttcactgcaacctccgcctcctgagtttaagcaattctgcctcagcctcctgagtagatggaactataggtgtgcaccaacatgcctgtctaatttttgtagttttagtagagacggggtttcgcagtgttggccaggctggtctcgaactcctgacctcaggtgatccactcgcctcggcctcccagagtgctgagattacaggcgcgagtcacgcgcccagcccagttgctatttcttaaaccttaacgtgcacatgaatcacctggggatctggttaaagtgcaggctctggtgcaggtgggctgggcggactgagactccacattctcacaagtgccctggtgatacccaggctgctggtctgcggacgtgactgagtagtgaggttttaggtgactgccgtgcatctggcctggaatcactgctgtagaactgaaagtcaccaaatgcaggggtgtttgcttcgtgggacaacttctgtgctagtgcggaaggggcttgctcctctggggcacacagaaaaatacagtgggcttcagttgagtcatctgtaaattggggctaattcattgttaattcgtagccaattcaattcaggtgctagggccagaggcctggaggtaggtgaggaagaagctctttacctttccaggttcttaggtaaggtccaagtggctgtaacagtggttaagagctagccaggggccaggtgcggtggctcacgcctgtaatctcagcactttgggaggctgaggcaagtggatcacttgaggtcaggagttcgagaccagcctagccaacatggtgaaatcccatctctattaaaaatacaaaaattagccaggcatggtggcaggcgcctgtaatcccagctactcaggaggctgaggcaggagaatctcttgaacccgggaggtggaggctgtggtgagccgtgattgcactgctgcactccagcctgggtgacagagtgagactctgtctcgaaacaaaccaacagtggttaagagcctggctgctggaatcagcctgaattcaagtcttgttcctgcacattccaccctggagaaatctggggcaagtgactgttccccgggccttagcttctcctgtcactgggacatcacaacagcacctaccttagggcaactcaggccagggaagttggtgctgcctcacctcccaatgtgcgtcctcctgggcctggagcctcagggcctctggaaggaggaagtgagcgcctctgggcaggattcctgggaggcctgggagagcaagggaagcgccaagagctgagcagagttctgggactgatccatggccctttctctctcacctttcaggaggtgggccccctccacccccagcacttcccacctggtcggtcccgaacggcccctccccggaggaggtggagcagcagaaaaggtggggctgggccctgggtggggaaccttagccgctgccagagttccatatgttctggaacccttgactcctagagttcagaacccagccaacttgcagttttcagaatgttcaagaaacttctgacactcagagttgcagaacctcctggtccctgcagattcctggaaatcagaatatggtggttgaaagaatcttgtggctgggcgtggtggctcacgcctgtaatcccagcactctgggaggccgaggcgggcagatcgcctgaggtcaggagtttgagaccagcctggccaacatggcgaaatcccgtctctactgaagataacaaaaattagccggtcatggtggcgcccgtgcctgtaatcccagctcggcaggccgaggcaggagaatcgcttgaacccgggaggcagaggttgcagtgagccaagatcgagccactgcactccagcctgggtgacagagtctcaaaaaaaaaaaaagaaaagaaagaatcttgggcattttgtaattcggtgttcctgacagtttagtgactgggatctcgcatcctgatctctccctgtcgctgccctgccctccattccccctactctcacccagcccccttcttggttccctaggggaggaaggcttgggtgagtattaggagccagccaccctggagacctctgagagagaggacggaggtcgctggccccttcgctggccatccttagggccctgattgacggcagctctctcgcctccccccacaggcagcagcccggcccgtcggagcacatagagcgccgggtctccaatgcaggtgatgctcagatagcttcgggagttgggagggggcctccctggaggaagtggccagccagctggacagtgaagaatgaggcttctctctctcagctgcccccttttctgtgtttgtttcaggaggcccacctgctccccccgctgggggtccacccccaccaccaggacctccccctcctccaggtccccccccacccccaggtttgcccccttcgggggtcccagctgcagcgcacggagcagggggaggaccaccccctgcaccccctctcccggcagcacagggccctggtggtgggggagctggggccccaggcctggccgcagctattgctggagccaaactcaggaaagtcagcaaggtgaggggccgggagaggtgggcagggggcaacagggcttttatgggggatgaggccagggctgccggcggtgtcattgggctggaaggccaaaaggcctgcccctaaagctcctgccccttttaaatttctccagcaggaggaggcctcaggggggcccacagcccccaaagctgagagtggtcgaagcggaggtgggggactcatggaagagatgaacgccatgctggcccggaggtgagcctgagcctggacccccaagtcacctggagttccagttcagtagggcccagtcagaggagggctccaattcctgtttagtttgtttcttttggtgaatgttccccctttgataaccaggtttgggatataatggtggggtttgtcatgaaatgcctgaggcttgcaaccacctaggtagcctgtagatgttctaaaacccagaattctagaaccgtaggagatcctgcctcagaattctgggaactcaggttcctgcaatctcagtgttccaacacagcaccgctccaccctcggaatcttactgttccctaatataagaatcatagaacctcctccaccctgattctagaaccacaatctcttgaattttttttttttttttttttttttttttttgagatggagtcttgctctgtcacccaggctggagtgcagtggtatgatctcggtccactgcaacctccgcctcctgggttcaggcagttcttctgcctcagcctcctaagtagccgggattacaggcatgagtcaccacacccggctaatttttgtatttttagtagacacaggatttcaccatgttggccaggctggtcttgaactcttgacctcaagagatccacctgcttcagcctctcaaagtgttggcattacaggccactgcgcccagcacaatctcttgaatttctaaaactagagtttccttaggttttcggagttccagaattctatgcgctaggatctacatttctagaactcccctcagaaggggatgggttgggtgacggaagcacgtgtttttgcttttctctcctgcagaaggaaagccacgcaagttggggagaaaacccccaaggatgaatctgccaatgtaagtcagggactcttcttgccctacatctcttaggccgtaccatgagggtagggatagtgggatgtgtggggtttgaacctgaaagaggaaatgggcagaggtgtggcaggggctggctcatggcagttttatttcctaccagcaggaggagccagaggccagagtcccggcccagagtggtgagtagagtgcccagtccagccacaggaactacaaatcccagaatactctgttctcacatgttaagcacccttataggagagtcagggcgaatggtgctggggattgtagtctcctgagatggggctttgatcaggggctgatgaggttgggggagtaagattgattggggggcagtcttttgtccctgatctttctgatttcttgcctatccccagaatctgtgcggagaccctgggagaagaacagcacaaccttgccaaggtaggccatcggtcctggggcccttggggaggtaaaggcgggcagatcgcttgagcccaggaggtcaagaccagcctgggcaacatggcgacaccccatctctacaaaaattagccaggcgtggtagcacttacctgtggtcccagctactcaggaggctgaggtgggaggattacttgagcccaggaagttgaggcctcagcgagccatcatcatgcctgcactccagcctgagaaatagaatgtgactgtctcaaaacaaaacacaacaaaccaaaaccaaaaaaaaaaaaaactggggccccaaaaatacttggacttgcccaatttataaggcagagctcaatgtgacccctggaataggaggcggggaagcaggtcctctctctaatctcattgctgtcccaaaccacaccaactcccccaggatgaagtcgtcttcttcggtgaccacttccgagacccaaccctgcacgcccagctccagtgattactcggacctacagagggtgaaacaggtaacttgggggggaagttggggaccacagcaagagagatctaggtctggcccctgccactggcatgccgtatgatcctagataacatctcagaaacctcaggtttccaatctgacaaatggagaaactggattgggtcaaggatgaccgagactccacacccccttttctggcacctgtgacagacattattaatctatcaccgcgctcattccagatgagtgccttgaattctttccgcacattgacccagctgtccatcaccaattggagttggcaggaggctggaatgcgcttgccaaccttggtactggatgttctccagtacttttccggctccaaggatccagaattctcccctagaatcctccagtcactctgcgaccttgacagcgatgtcatggtgtcgatgtaggggtaggtctcaaacctactacccctggcttttccatcaacaagaaagaggggactctggcagggcacggtggctcatgtgtgtaatttcagcacattgcgaggctgaggtgggagcattgcttgaggccaggagtttgagaccagcctggggcaacatcgggagacccccatctc[132 bp omitted]tgaaacccatcgctactaaaaatacaaaaattaggctgggaatggtggctcacagccataatcccagcagtttggaaggctgatggggacggatcacgtgaagtcaaaagttcgagaccagcctggccaacatggcgaaaccctgtctctactaaaaatacaaaaattagctgggccttgtggggggcacctgtaatccagttatttgggcggctgaggcaggagaatcgcttgaacccgggagccagagattgcagtcagccgagattgggccactgcactgcagtctgggtgacagggagactctgtttcaaaaaaaaaaagaaaaagaaaaagttacctgattgtggcggcaggtgactgtggtcccagctacttgggaggctaaggcaggaggattacctgagcctgggaagttgaggctgcaatgagctgtgatcatgccattgcaccctagcctgggcaacagagcaaggttccttctcaaaaaataaaagaagggggattcattcctgcaagtcccggtaccccctcctgattagttttaccccattaattttaggagcttctggaagaggtgaagaaggaattgcagaaagtgaaagaggaaatcattgaaggtgaggtggtttgctttggttttgttcttaaacatttacttattttggaggcatcatgtccctgggcaagagccctgttttggaagggaggaggcagagactctgcccctgacctctgctccttgtttccttccagccttcgtccaggagctgaggaagcggggttctccctgaccacagggacccagaagacccgcttctcctttccgcacacccggcctgtcaccctgctttccctgcctctacttgacttggaattggctgaagactacacaggaatgcatcgttcccactccccatcccacttggaaaactccaagggggtgtggcttccctgctcacacccacactggctgctgattggctggggaggcccccgcccttttctccctttggtccttcccctctgccatccccttggggccggtccctctgctggggatgcaccaatgaaccccacaggaagggggaaggaaggagggaatttcacattcccttgttctagattcactttaacgcttaatgccttcaaagttttggtttttttaagaaaaaaaaatatatatatatttgggttttgggggaaaagggaaatttttttttctctttggttttgataaaatgggatgtgggagtttttaaatgctatagccctgggcttgccccatttggggcagctatttaaggggaggggatgtctcaccgggctgggggtgagatatccccccaccccagggactccccttccctctggctccttccccttttctatgaggaaataagatgctgtaactttttggaacctcagttttttgattttttatttgggtaggttttggggtccaggccattttttttaccccttggaggaaataagatgagggagaaaggagaaggggaggaaacttctcccctcccaccttcacctttagcttcttgaaaatgggcccctgcagaataaatctgccagtttttataaatgctaagatctctggagtgatttgaaggcctgttctgatggggatggaggtgtgctcggcccccggtgcccctccaggaagatttggtcctctgctgagaacccctgcctcctcccaggaatccaccttcccttcatcttccttcccaccctgcatattgcgcctgctcactcatcctcaggcccgcagccaggatgatctctgccccctccagcctccctccccatgccccttaggaggccacttcctccccatcccaccctgcccttcaccaccctaggggaggccagaagcagcctcactttgtgtagccttgggcaagtccatttgcttacctcaggcctcagtttctgatttgggaaagggctcataagatgattctctgcccccactctaccactctcccagcttctttcctctttttttttttttttttttttaatgagttggagtcttgctctttcacccagtctggagtgtagtggcaggatcacagctcactgcagccttgaactcctgggctcaagggatcctcctgcctcagcctcccaagtagctggaactacaggcgtttggtatgacgcctagctaatattttcatttttcgtagagatgcggtcttgctgtgttgcctaggttggtctctaactcctggcctccagcagtcctcctgctttggcctcttaaagtgctggaattacaggcgtgagccactgtgtccggccttctttcctaatttcaatgacattttgcagacgcacattatggttctcagacacgttcttaagatctttaccccagagctcctttaattagaaaacgctgacagtcgatttataaagtagcattcagagtcacagagctcatccacgcccccttcagttgtcgggtgggtaggtcatatggcctggtggaataccccgcttggacagggggacctctgggctgagggacaggtagtccccctggaggaggcctttgcgtgaaggagggcggaggaggacctggaccagtccaaaggcaggaaggaagggcgatccctgcgtaccgtgaggggcagatttggagggaagttgggcgaactgacgatgacttaggtagtaaagggacaggccggtccctagcaaaggcaactgaagaggacagcgagggaggaccggataaaaggacagtagcagtaggtccaggactggggactggtgaccaagtgactgagcctgaaagccagaatggactagccctggtcaagaccggtttttcctcccaaaaggccacgtcctgctggaacagaccacagaatgccgggctgggaggcgtttccctggaagacccagcatagccatgccagtggggtgcgccataggtggaagaagaggggggttatgttggatcgatccactcagggaggggaggatgtcaatgacaggtactaagatggattaaggtcaggagccgcagggtggtgactcattggagctaacgcagtccaggattcacccccacctttccccctaagactgaggtagatggaagggggcgggtcgggaagtccgtaggaactttgtgcatctttacaatggtctgtaccaatgaggaggaggtaggtggtgttcggtgcaaaggatgagcgtcctaggggaagggtccactcaggtgagtgagggtgcgggtgacagaatgagaggtggctaaatccgggtgcagaattttgttttgccaaaagaggtggacgtcctgctggcctacctagcggtagggaggtggggtctgataaaagacgctgtctttccaaagtgctcaacaaatgcgctggcaggggcggggtgggatagggcggggtccttcttggaacgttccacctgcaggaggcggagagtcccagtggaaggtaccactgggcaggttagtagggaggttcgatcagctccagcccaggatctctccggcgcccccgaaggactgggtggtgtcagctgggccggtccaggatgggacagtgcggagaataggccaagacagagacttcgcagtccagacagcagtcacctccaagaccagggccccgagacctcctatttctcggacgccggcgcaactgggggtgcaggcggcgggtctcggaggcagaggtgggctcgcacctcctgcagctgagcgcgcagctcctccagggcgagctgcgtcgacgtcgcctgcacctgcgcctgcaactcctcgagcgccagccccaagtggcccacctcgccccgcagcgcctccctggcaacacgtcgctccttttccttgcggcgctgctgcaactggtggcgccaatactccagcatcaggcagctgcaggcggtgatgaagatgatgccctcgcccagcagctccgcgcccagctcggcggctgcaccctcgttcagcggcttgatggcagcggcattgaaacccatgatgcgcattttggtccgcatctccagccagtggtacactgcaggaaaagacaggagtcaggggtcttttgcagggcagcctcctataagccccgaccctctgtgcttcgatgtccccgttgtagcaatggggatgtggtcaccacaatcggacgcgtgctggcggggacgccttaacgaagacaagtgcaggcctcacacccagaatcctctagggaaaacttccttaactaatgacttactcatgtgaaggtggagtgtcagcttttgcatcgttataaacacagaagatgctgatgctctttttttttctttaatttttctttttttgagccagggtttcgctctatcgtccaggctggagtgcagtgccgaaatcacagcttactgcagcctcgaactcctgggctcaagcgatcctcctcccgcctcagcctccagagtagctgggacaacgtgtgcgcgccatcatgcctggctaattttttaattttttgtagaaatgggggctccttgcgttgcccaggctggtctcgaactcctgggctcaagcgaccctcctgccaaagcctcccaaagtgctgggactgcaggtgtgagccacggagcgcggccctgaggctaactcttaattccatcaataattcatacttcgctgggcgcggtggctcatgcctgtaatcccagcactttgagaggccga[133 bp omitted]gaagcaggagaatcgcttgaaacagggaggcagaggctgcagtgagccgagatcatgccactgtactccagcctgggagacagagcgagactccatctcaaaaaaaaaataaaattgtaacttgatttttcactgcactccccctcaaccccatgaactatatggaattcatcacatattctatctccttccctctcccctcccaatttttacaagtggtttttatttttttactgtttatttttatttatgtatgtatggtttttttttattgagacggggtcttgctctgttgcccaggctgtagtgcagtgacactatctcagctcactgcaacctccacctcccaggttcaagtgatttccaactaatttttgtatttttactagagacgggttttcaccatcttggccaggctggtctcaaactcctgacctcaagtgatccgcctgcttcagcctcccaaagtgctaggattacaagcatgagccaccatgcccagcctttatttatttatttattttcgagacagagtctcggtctgtcccccaggctggagtgcagtggtgtgatcttggctcgctgcagcctctgcctcccagattcaagccattctggtggcttagcctcccaagtagcttggttcaatggcgtgtgccaccatgtcacctactttttttttttttttttttttttttttttttttttgcattttagtagagacagggtttcactacgttggtcaggctggtctcgaactcctggcctcaagtgatccacccgcctcagcctcccaaagtgctgggattacaggcatgagctaccacacccagcctatttttttttactgtttattggtaacctatgtaattgctttgtgcaatgctttgtgctgcctgaaattgaaaatatagaccatgtaaaatatggaggttatggaaatattaatcctgtagatccataatgaagatgtatttttatttcactaaaccagtggcatgtgaagcattatcattaaatgccagctggactcactgcttcgtatcgtgccacattttcattttcttttatttcaactttgacgttactgtatgaaggttttagtttttcctagaatgatgattctcaaactaactatgtgacccacaaaaatttaccatgggaccaagatcatccagatgtttgctcctattctgtttattaaataaacagttgtggacacactagctgttctctgggctgctgcaggactgtcctccttcatactgctcctcctcttttgaggaacttgcatcctctttgttgaatttcattctagttttcctggagtatatccctagataccttttgcagaaagggtgcttggtatctcagtgttttgaatccttgaatatctgaaatatctttttccaccttcacattagatgagatgataaattctagccccagaatgactagttcgaaatcctattcctcagcagtttggtggcctggttccacgatgtgtaaaggcagaggggcttgttgtcatccctgtggcactgacattgcaccaagatgaatgtttttcttattccccttaaactcttctatcttctatccaaatcccgtttctctctttagcccttcgaatttttcttgtctgctcagtaaaggattaacttcatccaaatagaggtctgacctttgccttttactcctgggaggtaattttttagttcttggaatgtccagcctgagtttacatggggccttgggccacaccatatggtttgtgctaacagtggtgatttatggtgggggctttgggccatgtgatatcagcttaacctctggaggggctagaatctaaggggagccacacaagtggtcagccttatccacatgctgatccctattaaaaaccctggacaccaaggctcaggtaggcttccctggtgggtgacatcatgtcacttatcattgctgggagaagttagtgctgtccacaactgtaccaggtattaaattggcacttggaactctcctggacccatggacctcttccctgggctgcttttaatctgattcttttcactgtaatgagccacaaccatgagaataactgatcctagtgagttctgtgagtctttctagcaaattactgaaactgatggtgatcttagagactcctgagcttgcagtcaatgacagaagtgagggtggtcttggtgaccccctaaatgtgtgtcttatctgttgcctcctctccattttctcctacccttctcctaccccttcccagtctggaacgccaccctgcactgatctcctcactttcccttcctgtttttttccattgctcctttttgttacaccactgggaggttttgttgactttcagaacttattttttccccctaattttcagtctttatttaaaatttgattataaaatatccaaacatacagggaagtttagtgtccattcggctttaaaattattttattttattttattttttaatagagatggggtctcactatgttgtccagccttgtctcaaactcccagcctcaagcaatcctcccacctcagcctcgtaaagtgctgattgcaggcatgagccactgtgcccagccctaggatgatttttattttttaaattttttttgagatggagttttgctcttctcccccaggctggagtgcgatgacaccatctcggctcactgcaacctctgcctcccaggctcaagcgattctcctgcctcagcctcccgagtagctgggattacaggcatgcaccaccatgcccggatatttttgtatttttagtagagatggggtttcaccatgttggtcaggctggtctcgaactcccaacctcaaatgatccacctgccttggcctcccaaagtgctgagattacaggcatgagctactgcatctggccaggatgatttttcttttttttttaaggcggagtctcactctgacgcccaggctggagtgcagtggcgcatctctgctcactgcaagctccgcctcctgggttcaagccattctcctgcctcagcctcccgagtagctgggactacaggcatttgccactatgcccggctaatattttgtatttttagtagagatggggtttcaccaagttagccagaatggtctcgatttcctgacctcatgatctgcccgccttggcctcccagagtgctgggattacatgcgtgagccaccgcgcccagctgaatgtagctaatttttaaataatcaggagacaccttgtgctacagatgtacgttgtttccttttaccctatacctttgaggccggtacttaaacatcagccggatcctaatccaggagaggtcagttcaccagtaagtccgtactccagggcaggccaggccaggccaggccaagcttctgttggttgaatgcaaagcatggtgaggtgtgtgaattcacttcagtctcctatgggaggggccctcttggtggccctggatgggcagggtcaaggtgaaaacccagggattggtttcacaaggttgaacaagcggctccgtcctgggcaggctccatgcttctccccgaaagaaggcaccatagccaccattaagcagtgggcaggttgttgcctctgactctggcctggagacaagtcagttcagtccatgtgaattctagtatcagtttgtcagtttgcacacacatgcacatgcacaaatatacaaacacacaccttttggcatagaattgggattgacttgaatctataaatcagtttataagatgatatctttacaatattgaaccttccaattgaaggaatccacagctttggcacaaagattattttacagtgaaaacacttgtaatgttatctacactcctcttattggactaaaggagagcctcctgaaaatacaactgccattaaccccctccaagggagttttctgcgaattccaggaaggagacagactgtccatctcttttagtgttaaaaatcacacaggaaagcaatagaggccaggcgctgtggctcatgcctgtaatcccagcactttgggaggctgaggtgggtggatgacctgaggtcaggagttccagaccagcctggccaacctaattaaaccccatctccactaaaaatacaaaacttagccaggcatggtggtgggtgcctgtaatcccagtactttcgaggctgaagcaggagaattgcttgaacctgggaagtggaggttgtagtgagccaagatcatgccatcacactccagcctggtgacaagagcaaaactctgtcccaaaaaaaaaaaaaaaaaaaaagtcaagtaaagaaaacaatagaactatccatacttttccactgaacccctttttctttttcttttttttgagatggaatcttgctctgttgcccaggctggagtgcagtggcgtgatctcagctcaccacaacctccgcctcccaggttcaagcgattctcctgcctc[132 bp omitted]cggccttccaaaatgctgggattacaggtgtgagtcactgcatccagcctgaactcctttttcttaagttggtaaataaacctttacttccagctattcaatgagttactcattacagagttcccttgcctaatgtgtaaataaagtttttctttccacgtgttgatctgtctattgttaattaatttgcaggttcccaacaacagggatctagattggtagaggaaaagattttcctgtcaatgcaatccatgaacatggtattctcttcatttaggtctttaagaaatttatctcaataatgttttgtagtttacagaatagatatcttgcatgtaaattcagtttattcctatgtattagatattttgatactattttgatggcaacatttcaaatttcattttctatttgtttgttgctggtactgatgataggaataaactgatttccgtaccttatatgcagtgatcttgataaattattacttttttttttttttttttttgagataaggtctcattctgtcacccaggctggagtgcagtggtgcaatcatagcttactgcagcctcaagtgatccacctacttcagcctcctgagtagctgggactgcagggacacaacaccatgcctggctaatttttgtaattttctgtaaagacagggtttcgccatgttgttcaggctggtctcgaactcctgggctcaagcgatccaactgccttgacctcccaaagtgctgggattacaggcatgaaccgccatgcccagcctaattagttcttattcttcttagtcatataatttgtttataaattattttaattgtacatatacactttaattgtttgaacataataactgtttttttcttttcttttttttttttttttttaagagttgaggtctcaccctgtcacccaggctggagtgcaatagcacaattatagctcactatagccttgatctcctgagctcaagagattctctcacctcagcctcctgagtagctgggactaaaggtgcctgctgccacaccctgctagaaactggttttcttgccgggtgtgatggctcatgcctgcaaccccagtacgttgagaggccaaggtaggcggatcacctgaggtcaggagttcgagaccagcctggccaacatggtgaaaccctgtctctactgaaaaaattaaaaaattagccaggtgtggtggcatgcacctgtaatctcagctactcaggaggcttaggaaggagaattgcatgaacccaggaggtggaggttgcagtgagccgagatcacaccactgcactccagctggatgacacagcaagactctatctcaaaaaaaaaaaaaaaaattaaaaaaaaaaatgtgggccgggcacggtggctcatgcctgtaatcccagcactctgggaggctgaggcaggcggatcacatgaggtcaggagtttgagaccagcctggccaacatggcaaaaccccgtctctactaaaaatacaacaaaaaattagccaggcatggtgacgggtgcctataatcccagctactagggaggctgaggcaggataattgcttgaactttggaggcagaggttgcagtaagtcaagatcgtgccactgcactccactcttggcgacaagagtgaaactctgtctcaaaaaaaaaaaaaaaagtgtatggaaacacaaagggccaagaatagtaatactgaagagaaaaactggagaccttacactaccagatataaagctatcataaagctataatcatcaaaacagggtggcatttccacatgaatagacaggccagtggtaaagcgtagagaatccagaaatattcacacatgcacagtcatatgacttgtgacgaaagtgacactgtagtgcagtgggaaaagaatggactttttaagacacgttggatcacttgaatattcacagagaaaaaaataaaccttaacatctacctcacataatacacaaaaattaattccacagggattgtagatcaaaatatgatagacacaaaaataacacttttagaaaaaaaaagtaggaggctgggtgtactggctcatgcctataaactgtgctttggaaggccaaggtgggaggattgcttcagagaaggggttcaagaccatactgggcaacatggtgaaaccccatctctacaaaaaataaaaaattagcccggtatgctggtgcacctgccaccatgccaggctaatttttaaaaaactttttagtagagatggggtttcgccatgt[132 bp omitted]gctgagcgaggaggatcacttaagcccgagagttgaaggc[137 bp omitted]ggcaaatcatagactggaagaagccatttgcaatacatcaatctgacaaataactcaaatttaggacatacagatacctcctgccaatcaaaaggggaagggtagagaacctagtggagaaggacttgactcacaaaagaggatggtatctttttcttttcttttattttctttttttgagatggagtttcgctcttgttgcccaggctggagtgcagtggtgcgatctcggctcactgcaacctctgccctccggtttcaagcgattctcctgcctcagcctcccgagtgccagagcagggagggagaatgacgagactaaactgtagcttcagctttctctctttaaaaaccaaagcaaagaggacaaaatgttcatttctattaattctaagtggtgggtacaaggttattcattatattgttttctgtatgtctgcaatatttcataatatatatgttttcaataaaaattagctgggtgtggtggtgtgtgcctgtagtcccagctactcaggaggctgaggcgggaggactgcctgaattcaggaggtgcaggttgcaggttgcagtgagctgagatggtaccactgcactccagcctggaggacagagctaggctccatatcaaaaaaaaaaaaaaaaatgccacctgaaaaaaaaaaaaaaaagattctagctagctatggagtctcacacctgtaatcccagcactttgggagatcaaggtaggaggattgcttgagaccaggaatttgagggcaacatagtgaaaccccatcttcacacacgcacacaaaatagctgggtgtggtggtgtatgcctgtggtcccagctcatcaggaggctgaggggggaggattgcttgagcctggaagatcaaaactgcagtgagctgtgattgcactactgcactacatcctgggcaaaagagtgagtccctatctcaagaaaaaagcaagtgaggccaggcacggtgtcttacacttgtaatcccagcatttgtgggaggccgaggtgggcagatcacttgaggtcagaagttcgagaccaggctggccaacatggtgaaactacctgtctctactgaaaatacaaaaattagccaggtgtggtggcgtgtgcctgtaattccagttacttgggaggctgaggcaagagaattccttgaacctgggaggcggaggttgcagtgagccaaaattgtgccattgcactccagcctgggcaaaaaagtgagactccgtctcaaaaaaaaaaaaaagaaaagatgctcaacacattagttagtagagcaatacaagtcaaattcacaatgagatgccatttcccagccactggaatggctatagtcaaaacagtgaacaaccactaatgcttccaaagtttctgtattagtcagttttcacacagctataaagaaattcctgagaatgggtaattataaaggaaagaggtttagttgacttacagttctgaatggctggggaggcctcaggaaacttacaatcatggcagaaggcaaaggggaagcaggcacctcctcacaaggcagcaggagggagaagtgaaagggcaggaaaaactgccattttaaaattcattagatctcatgagaattcactcattatcaggagaacagcataagggaaaccacccccatgatcacttccctccctcaacacatgaggatgacaactcgagatgagatttgggttgggacacagagccaaactatatcagttgtagggtaacaaaactctcgcatgtcactggcggaaatgtaaaatggtgcagccactttggaaagtagtttggcagtttcttaaaaagttaaacataggccaggtgcagtggcttacacacctgtattcccagcactctgggaggctactcatcgcttgaacccaggagttcaagaccaacctgggcaacatggcgaaaccccttctctacaaaaacatcacaaaaaagttttaatatttttattttttctgccacgctcggctaatttctgtatgttttgtagagatgaggtctcactatattgcccaggctggtctcaaactcctgacctcaagctatccacccacttctgtctcccaaagtgctgggattacaggcatgaacactacacccagccaaaaaacacaaaaattagccgggcgtggcggtgcatgtctgtaatcccagctactgggcgggggtggggctgaggttgcagtgagcagacagcgcgtcactgcactccagcctgggcgacagagccagaccttgtctcaaaaaaaaaaaaaaggaatgagatattcatgcaataaaatggaccatgcattgtatgactccatttacattaaatgtcccaaataatgcaatctattaaggcagaaagtagatcagtgatttttaggggctgaaggaaggagaatggagagtcactgcaaatgaatgtgagggatcttttggagatgatggaaatgttctgaaattggaatgtggagatggttgcataaccatgtcagtttactgaaaatcat[211 bp omitted]gaggcaggagaatcgcttgaacccaggaggcagaaattgcagtgagtcaagatcgcaccactgtgctccagcctgggtgccagagcgagactctgtctcaaaaaaaataaaaaataaaaaataaaaaataaaataaaacaaagggtgagtttcatggtgtgtagattatgccttgctgtttaaacaaacaaaccaggccaggacacggtggctcatacctgtagccccagctacttggggggttgaagtgggaagatcgcttgagcctgggaggttgaggctgcagtgagctgtgactgcaccactgcactgcagcctgggtgactgagtaagaccctgtctcagaaagaaaaaaaaaaaaaaaaagggggccaggcacggtggctcatactaatcccagcactttgggaggctgaggcgggcggatcacctgaagtcaggtgggcgtggtgacaggcgcctgcaatcccagctacttgggaggctgaggcaggagaatcacttgaacctgggaggcggagaatgcagtgagccaagatggcaccactgcactccagcctgggtgagagagagagactccgtctcaaaaaaaaaacaagcaaaaaagccagaacaccggggtccaggacctctctcactggaattggcaaatgctgtcatgaatcataggcaggatgggtgggggttcacagtctctatgctgggcccaagtggatcccaccaaactcaggacctcaggaatgaatgtctgtacttctgaggtttttgattttccagcatctaaacccctctgttgcattggggaagcgccattgctgttagtctgagtcaggaacagcctgcaacagaaactggagaaacccatggcttccccatatggggactgttctcccacaaccagaaggctgccatacaatgtcactgggaacccaggctccttctcgttcaatccctaccctcctcattatggggcttttagccacatgcccaaaagatgcctgctgcccctcggcatcacagcctccttctacacaggaggtgagggcagggggtgtcagaggaagtgtgtgtctaatctgtcactttttatggaaaagccactagattttacagagcccccatgccacatagccatcctgtactataggggggtctgggaggtccattgttcttgactggatacagagtcacccctcatttaattggggcctggtgtagcggctcaggcttgtaatcccagcactttgggaggctgaggcaggaggatcatctaagtccagaagtttgagactagcctgggcaacacagggagacctggtctctactaaaaaataaaacaaaataaataagagaaatttttttttggagaaagagtctcagtctgttagccaggctggagtgcagtggtgcaatgatggctcattgcagcctcgacctcctgggctcaagcaaacctcctgcctcagcctcctgagtagctgggactataggcacacaccaccacacctggcgcattttaaaacattttatagaaacagggtctcactatgtttcccaggctggtcttgaactcctgggctcaagcgatcctcccaccttggcctcccaaagtgctgatattacaggtgtgagccaccacacccagcctgaacctgaaatcttggggaaggcttcaaggatacgaagagacccctaggatccatgttagggtgtggagtaggtccacggcagtggtagggggtggtacccatggtgctgacagccctctgaccttggagtccctgagtgcttcatgctcgctgcaacccaacagacaggctccttgctgggaagtggctgcccagccagggactatagttaggtgcagttaggtgtggtcagggcaccgagttctaggaaaaataagccagccaagtgaagccggctacttccagccctggtccatatgagccatgctgtggtcctcatgaagaccaccccagggtgaccttgaaataaacacactgaagatggcagagctgcaacagcctgagtccctgaatgactgtgtggaggagggctgccctgccaacctgttcccggctagtacagccgtgcactgcttaatgacagggacacattctgagaaatgcattgtttggtgattttgtcattgtgcaaacatcacagagtgggcttacacgaacctagatagtgtggcctgctacacacctaggctatgtggtagagctttctgctcctaggctataaacctaaacagcatgtgactgtactgaaaattgcaggagttgtaacacaatggtaagtacttgcgtgtctagacacatccaaacatagaaacggtacagtaaaaatacggtggtatcattttatgagaccactgttgtatatgcggtttgttgtggacagaaacctcattatgtggtacagtacttcactgtttttttgtttttttttttttttttttttttgagacggagtctcgctctgtcgccaggctagagggcaggcagtggtgcgatcctggctcactgcagcctccaactccctggttcaagtgattctcctgcctcagcctccagagtagctgggactacaggcacctgccaccacgcctggctaattttagtacttttagtagagacaggtttcaccatggtggccaggatggtctcgatctcctgacctcgcaatctgcccaccttggtttctcaaagtgctgggattacaggtgtgagctatcatgcccagcgcgtgacttcactgttttgtcttattttgtttgtttatttatttatttatttatttttgagacagggtctcactctgtcgcccaggctggagtgcagtggcatgatctcggctcactgcaacctccaactctccagctcaagcaacccacccacctcagcctccctcgtagctgggactacaggagcatgacaccatgcctgactaacttttgtatttttgaagaaatagcgtctctgtatattgcccaggggctggtctcaaactcctgggctcacgtgatcctccagctttggcctccctaagt[133 bp omitted]ctcctgggtttaagtgattctcctgcctcagcccccggagtacctgagattacaggcacacgccaccacgcctaatttttgcatttttagtagagatggagtttcaccacgttggtcaggctagtctcgaactcctgacctcaagtgatctgcccaccttggcctcccaaagtactgggattacaggcgtgagccactgcgcccagctgtattttaatttttataatttatttttatttgtagaagaggagtcttgctatgttgcccaggctgttctctaactcctgagctcaagcaatcctcccgcctcagcctcccaaagtgctgggattacaggtgtgaacactgcaactggccaacgttactattttaggagcaagaagtaaactcgttcactcaatatcattacacatatggggtctctgttacagcatcggcatctctaactgtaaacctctcaaggttcctgctggttttcttagcctccagtgagctacctgatatccttccagtaagttctttttctgcttcagttagcccaggaaggttcctgttgctggcaatgcagagtcattttgcaaccgttcactctgtgctaagcaacttcctaagtgttttgcatgtattaattgattcactttcataataaacttacaaaggaagttctgttatcaggcacaagatacccagtgacttgcccaagctcatccaactggtatgaggcagagctagggattgattccaggcattttgggatctgagcccatgcccttcccatgatgcttcactgctctcgagacaaatgatctaagcctaaaaagactgcaagctacatgcacgttcatagcagccctattcatagccaccacgcggaggaaacaaccccaacgttcaacagatgtatgaataaacaaattgtggtctagcc[135 bp omitted]ca[142 bp omitted]gaaaccttgtctccaccaaaaacacaaaattagccgggcgtggtggcacacacctgtgatcccagctactcaggaggctgaggcaggagaatcacttgaacccgggaggtggaggttgcagtgagccgagatcatgccattgcactccagcctgggcaacaagagcaaaactccgtctcaaaataaataaataaataaataaataaataaataggaaattaaccgggcatggtggcccatgcctgtaatcccagctacttgggaggctgaggcaggagaatcgcttgaagccaggaggcggaggttgtggtgagccgagatcgtgtcattgcactccagcctgggcaacaagaggaaaattccgtctcaaaaaaacaaaaacaaaaacaaaaaacaaaaattagccaggcatggtggcaggtgcctggaatcccagctactcaggaggctgagg[132 bp omitted]caagacaaggcaggataggcctctacttcaaaacagagaaaaaaggggctggatgtggtggctcacacctgtaatcctagcactttgggagctgaggcgagtggatggcatgagcccaggagttcctgaccagcctgggcaacataaagagacccccatctctacaaaaaattaagaaattagctgagtgtagtggtggcacacctctattcccagctactctggaggctgacatgggaggattgcttgagcctgggaggctgaggctgcagtgagccgtgattgcaccaccgcactccagcctgggtgacagagcaagaccctgtccaaaatgaaacaaacaaatggaaaaaacaacaacaacaaccagaggctgagcacagtggctcacacctgtaatcccagcttaaaaatctcttcccagagtaaaagttagtcttcatgctggcccaaggcagcccacattatacaggtttgtataatacatacatcatatgtacatgcttttcttttttttttttttttttttgagatggagtctcactctgttgcccaggctggagtgcagtggtgtgatcttggctcactgcaacctccgtctcctgggttcaagtaattcttctgcctcagcctcccaagtagctgggactactggtgtgtgccaccacgcccagctaattttttgtatttttagtagagacagggtttcaccatgttgcccaggctggtcttgaactcctgagattaagcaatcctcccacctcggcctccctaaatgctgggattacaggtgtgacaggccatgcttttctttaagaaataaaataacggagaataaaaagtaacgaagttgcccatcacacataagaacaattattattcagagaaacttgttctaacaagacatataatacataatgtatgatattaacatatcatccaatgtgttatggaacacacttaatgggtttcatatgtttataatatatattaagtatatagaatgcatatatatctgtagttattcttcatgaaatggaatacaataaaataggaaatattaaaccgggctgcaaatattaagggtaattatttaatgaaactttcattccaatgatatgtacataagcacatacactacatataatagatgatgttatgttacacatgacataaaatatatattttatattccattatatattgtgtcacataatatatgaattatacacttttaaaatacatagaattgtaaattattgtataaatatgcacacgatggattacataaactctgcttttttttttttttgagacagggtctcactttgtctcccaggttgaggtgctgtggcctgatctcagttcactgcagccttaaacacccgggttcaagcgatcctcctgcctcagccccccaagtagctgggactacaggtgtgtgccaccatgcctggctaattttttgttttgttttgttttgagaccaagtctcactctggcacctaggctggaatgcagtagtgcaatcttggctcactgcaacgtccacctcctgggctcaagcaattctcctatgtcagcctctcatgtagctgggattacagatgtgcaccaccacacccggctaatttttgtattctttttattagagacggggcttcaccatgttgggcaggctggtctcgaactcctgacttcaagtgatcctcccaccttggtcttccaaagtactgagattacaggcgtgagccaccgcgcctggcctaaaactctgcttcttattgtggcacgtggctgtagattgaggtggaggttctgagatctgcgcgcagtgggggttactgctgagcactggggtcatttcctatggggaaggagggagggagggaggactccacagagggggaagctgaagccagatgtggtggaagcagaggcctgagtgatcctgttggggctccagagctgggatgacctccacagttgtgccaatcaaggcaaggggcagcctttgcttgcctggccccctcacctaacttctcccctcgcttactctattccaggggatggtaaactttttctgtaaagggccagagagtacgagagccctaggatctctgtgcaaatactcagctctgtcactgtactgcaaaagcaactgtggaaaatatgcaaacgaatgagcgcctgggttccaataagtctttatttacaaagacaggaagcaagggtccccttgatttggcccaaaggccttggtcagcgagcctctgctctattctgacagccagaaactcttgctgttccaggaacaggccaaggccacatctgtcctaggactttcacagatactcacagccctcttcctatctccctccatctgaagcgctgcctcctccctgcccacctgtctagatcagcggtgcccgtaagtccggaactcctaccctgcctccattcctctcagtcctcatcaccctatgctggattagctttttccttttttttttgagatggagtctcgttcttgttgcccaggctggagtgcaatggtgcaatattggctcaccgcaacctccgcctcccgggttcaagcgattctcctgccacagcctcctgagtggctgggattacaggcatgcaccaccatgccctgctaattttgtatttttagtagagatggggtttctccatgtcggtcaggctggtctcgaactcccgacctcaggggattggcccgcctcggcctcccaaagtgctgagattacaggtgtgagccaccacgcctggccactctttccttctttattgccggtctctggcactagaatgtcagctccagtgagggcctctgcttgctcccaactggctcccagctactagaatggagcctggtgcagttgatcctcagtacactcagagttgccatgcttctcctctctctgtccacaccgactccagctacaagccattgccactgggggacccaagcctgccactcagcaacacagcgaccagcccaggagtagctccgtgagccaatagatcaggttggggcttatgtaaagcccattttctcctggggtggctctcagccattttgcctccctccaggcaatggcctgccctacagagaaaccaacaagagggacagcagggcctgccaggagatgggaggggcacagccctcagggcacctcccagggttttgtgagctgggatgaatgggtttatagtcctgagtcactccagagggaggattccggattcagcccagcccctgcttcctaaacaactatggggtggggcagggaacactggaaaagaaatgtacgtgtgagcatctgtaagacccggtgacggcagggctggggctgtctctgtcaccactgtgaccccagcatagggtggggcagagagtgggtaactcagtgagttttgtgttttattttttttattttttttttttttgcgggagacgccctaccaaggacactgggtccatgtcccggtgcgggaccacctcagtgagttttttgagtgaaagaataaataaaggatatttttcctaaggttgacatggaccttatttatttatttatttatttatttatttagagatgaagtctcgctctgtcacccaggctggagtataatggcatgatctcggctcactgcaacctccgcctcccgggtccaagagattctcctgcctcagcctcccgagtaggtgggattacaggtgcacaaccaccatgcccagctaatttttgtatttttagtagagacgaggtttcaccatgttgatcaggttggtcttgaactcctgacctcaggtgatccacccaccctggcctcccaaagtgctaggattacaggtgtgagccactgcgcccagtcccaaggactttttaaatatgaaaaaagaatgcatcaacttgaagataatcagcttcatttacaaatttattctaacccctctccccaaattacaaggtacacagaattctagctagcagaacacacgagcagtgaaccatcctctggcctcttgcattttgagaggacgttctttccacttccacacactctggccacccctgacgccgcagtgggggaagtagatggccctgctgcccacgatgactggctgcctgtcagggcagggcagggcagggctgagtgcgaagtctctgagatgtgagagcagcactccatctgggtcaggacagcgctggggtcaggaattggagctcctgcctgtgttcacactcccacctctgttttttttttttgagttgagtctcactctgtcacccaggctggagtgcagtggcgcgatctcagctcactgcaacctccacctcctgggttcaagcaattctcgtgcctcagcctcccgagtagctgggattcaggaatgtgccaacatgcccggctaatttttgtatttttagtagagacggggttttgccatgttggccaggctggtctcgatctcctaacatcatgtgatcagtccaccttggcctctcaaagtgctgggatgacaggcgtgagctggcctgggtcactcccagttttaaacacagcccactcaggacccactcggtcagttccctctgctcc[148 bp omitted]accccgtctccactaaaatacaaaaattagccaggcgtgggtggtgggcacatgtaatcccagctacttcggaagctgaggcaggatcattggttgagcctgggaggtagaagttgcagtgagccgagattgcaccactgcactccgtcagggtgacggagctagactgtctccgaaagaaaagaaaagaaaaaagaagagaaaagaagaaaagaaaagtttcagaacctgtttcttggctttctatctgggcagatcttggtccaggccagttttacctctttagagaagggaggtgaggatggaagtcggggaaagcccggccctcccactttcacctgcagcttcccaaaagcgggcccaggtggaatggtcacccagtttacacaatgctatgatctctggtgtgatctggggctgctctgagaggggatagagagggtctcccactatcaacgccacctctgggatggtctgggcctctgtgtagagatcgtcaccctcccagcctctgctcagccatcgcctctccctcctcactctgcagctggggtaatccaagcctctcactctgcccctactacttcaccaccctgggcagtcagcccctcactggctgtggcatctctggcaagtccctttgcttacccctggccttagtttccccagctcatagggtgactcttgggcctctccccatcagaaccctcccagtttccctcctgattttaataagctctgtacccattgtggagatccacatggtggttcaggtacagcctcaggatgccttcatcaccttgcagctcctctaatgagagagctacagtcggaaggacagactgcaggctactgggacccaccccctcccgcttcagtggcagatcctggaagagaaacccagtagaaaagggtggttcctagactgttcctctcagctagcaggaaggccaaatggcccgcggggttggcaggagtcccagggtactttttttctgagaaagggtctcactctgtcatccaggctggagtgtagtggcgcgatcacggctcgctgcagcctcgacctccagggctcaggtgatcctcctgcctcagcctcccaagtagctgggactacaggcatgcatcaccgcacctggctaattttttattttacttttgtagagatggggtctcactatgttgcccaggctggtcttcagctcctgggctcaaagagatccctcctgccctggtctcccaaagtgctgggattacaggtgtgagccactgcacctggacgccagcgtactcttggggtgaggaggaatagtgggctgaatggcttgaatggtgtgcccccaacagacaagtccacatactaacccccaggacctgtgcttatgacagtttatttggaaaaagtgttttttcagatgtaattaagggtcttgaggtgggatcatcctgaacttaagatgggccctaaatgcaatgacaggtgttcttgtaagagacaaaatagaagagggaaaaggccatgtgaagctgcaggcagagccaaggaaggcctggaatcaccaggagctggaagagggagcgtgtccctgtcagcaccttggtttcagacttctggactccagaactgtgtgaattaaattcctgttggacttaagccatcaagttcaccacccaatggtgatctgttatggcagtccaaggaaattaatcaagcagttaaggccaactgctggcctaattggtaggatgggggtgggaccgggggctatggaggcaggagggtactgctacatgaagacaggctgtcgggtcagtccagagctccgaggaaagaaagcaagagcacacagattaggagacacggatggaagatgaaggatgtgacaattgaatccatgggcttggattcgactgggtccctgagaaatgctactgagcaaggtggggaaggcaagaaaggacatgccacacagtacaagctccagggactctgaggacaggaaaatagggggctgaggctgaaggacaggctggattagccctagttaggatcaaatttcccaccacggaaaggggggttggaggacattcacagaaaagatcctgtagtgccattccagtgggttgtgccatagactcaaggatgagggggttctgttggaatagtccacttcgggtctcaagggaaggtacaatgattccagggattgactgcaggccaggaccttttgtgggtttttttaagatggagttttgctcgttacccaggctggcatgcaattgcgcaatctcggctcactgcaacctctgcctcccgggttcaagcaattctcctgtctcagcctcccaagtagctgggattacaggtgcatgccaccatgcccagctaatttatgtatttttagtagagacggggtttcatcatattggtcaggctggtctcgagctcccgatctcccgacctcccgacttcaaatgacccgcccacctcgaccttccaaagtgctgggattgcaggtgtgagccaccgtgcccagccaggattttttttttttttttgagacacagtcttgctctgtcacccgggctggaatacagtggtacaatcttggcctccacctcccaagttcaagcaattctcctgcctcagcctcccaagtagctaggattacaggcacccaccaccacgcccggttaacttttggttttaagacggtgtcttgctctgttgcccaggctagggtgcaatggtgccatcttggctcaccgcaacctccacctcatgggttcaagcaattctcctgcctcagcctcccgagtagctgggattacaagcgcaccccaccacacccggctaatttttgtatttttagtagagacggagtttcaccatgttggccaggctggtctggaactcctgacctcaagtgatccgcccgcctcggcctcccaaggtgctaggattacaggcgtgagccaccgctcccagccgcaccgtttttttcctccttaagagagcactgatgctcagctagagctgaccttagaaggtgagggggagaaaaggccactgcaacacactgcatttccttacagtggtctgtgccgattgacaaaaagaagaaggtgttccagtgtaacagatgagtgtcccagtaaaggttaacactgatcaggtaaaccgggggtgggggtaacaataacacattgattcagctcaagaccaggttccattttttcatttgccagagtgcccacggtgtcctgctggctgggaccttgcaggtcgtcctggtttggagtgggggataggaggtgaaggatgatggagggggctatgttgcaacgcttcacctgctggtcccagtggcaggtaacggctgctcttatcagcaggggtaaccaaatgccaagttgcatcaagatcctggtggtttccactgggccagcgcaggcaagggtggtgcgggaagaaggccacgttaggtacataggccatgtccaaattcaggttccatccagcaagctcctatttcttggacgcaggcactgcgtgggaagcggaccggccgggattgcagagctgggcgcgcacctcttgcagctctgtgcgcagttcctccagggcgccctgtggcggcgccgcctgcacctgcgcctgcagcgcttccagcgccagcgccaggtggcccacctcgtcccgcagcgcgttccaggcagcacgctgctcctcctccttgtggcgctgctgcgcctggtggcgccagtactccagcactaggcagccgccgcccacgatgaagatggtggcttcgcccagcagctctgcgcccagctcagctgccgcctcctcgttcagcggcttgatgaccgtgccccggaagcccatgatgcgcatcttggtccgcatctccacccagtgatacactgcgggggaagagaggggtcaggctgcgctctgggagccccctgcaagccccacccctctcacccagggaatgcagtcacctagcctgggtaacccaggggtcttttaaaagaccagatgattctagcgagcagccaggaataagaaacactgccccagaagggaggtcctcggacttgaggggccgcgccccaagagggacaccaggagcttccacagcgccaagttcatggacggtgtaaaggtccagttgccagatgcttagttccctgtgttcctcccttaagccactgccatcctggctgtcctgccctggcactgtcgccccacccacttcccaggagaaagaccaacctcctttcttgccttattttcccaaaatgcaaagttggggctacagatgggggagaggggggctcctggctccaaagggcagcttaaggtggcagtcgatgctaagtgcctctgaacacttagatacacttgtaataatcaatcatttttgcaagtctgatggctccaatcctagaatttcatcagccctgaaggtgcagctaagagctgcgagctcttcacagtgaggttttgggcacataccttggtgggagctcaagaggtgagtggtgctgctggaacaaaaactccttccttgcctagctgcttctttatgaaggaaggttctcagcacttgagtctttaaaaccaatgcagaattgatgctgcatcctgactcactcctgcaacaattaatattcatccaagggcacatgaaaccacagagggaacccttgtgtggtgcctttgcagactcatttgcaacatctccttttacttttaaggtttagtaattattcatgaaaatgtataaaagatgaactttttgttgttgttgttttagagacggagtctcactctgttgccaggctggagtgcagtggcacagtcttggctcactgcaacctcctcctcccaggttcaagcaattcccctgcctcagtctcctgagtagctgggactacaggcacgcgccaccatgcccgtctaatttttcgtatttttagtagagaaggggtttcaccacgttggccaggctggtctcgatcatctgacctcgtgatccacctgcgttggcctctcaaactgctgggattacagccatgagccaccatgtccatccaaaagatgaacattttaaagtaactgcgcactaataatttcaaaattaactcaatccagaagaaaataacttagcatttagaaccttatggtcacaggaaattaacatgtaaatttctgtatgtattttggttgccgacatataaatcactagatggaattctgtgggtatgtggactgtaaatacaaaagtacatgaacaaaaagaaaccatgtgaaatttctgactgaaaaagaagagcttgtttttatttgtattattttcgagacggggtcttgctttgtcgccccggctggagtgtagtggcgcaatcatggctcactgcagcctcgaccttccaggctcaaatgatcctcccacctcagtcccttgagtaactggga[136 bp omitted]gcctcctgagtagctgggactacaggcgcccgctacc[142 bp omitted]gtcatttttgtattttttttaaaatagagatggggtttatcagtatgttgcctaggctggtcttgaactcctgggctcaagtgatctggctgcctcggcctcccaaagtgctgggattgcaatcgtgagccactatgcctggcctatatatatatatctttaaaccagacattggtaggcatcaaatcattattgtatgcgaactgcaataaatatgaagggaaggatgcaccagctgtttgaacatgtcagtatcataacacaccagaaccagaaattccatccttcacaactacttaaggttaatgaagaaaagttttacttgtcaacttgaaaatgcactagagggcacacaatttattttttctttttctgagacaggatctcgttctgttgcccaggctggagtgctgtggaacaatctcagctcactgcaacctctgcctcccaggctcgagtcatcttcccacctcagcctcctgagtagctaggacaacaggtgcatgccaccatgcctggctaattttattttttttgggtagagatggggtcttgccatattccatcttatttatttatttatttaacagatgggctctcactctgtggtccaggatggaaggcagcggctccatcacagttcactgcaacctcgaacacctagactcaagcaattctcctgcctcagcctctggagccgctagaactatagatgccccaccatgcctggctgtttttaaattgttttttggtagagactgggtcttgctatgttgccaaagcaggtcttgaactcctgggctcaagcaatcatcctgcctcagcctcccaaagtactgggacgacaggagacagccactgagcccagccactacacatttttcatcttcaaaggggtggggtggcaggaaggcttggggagctctgctggagctggagggaagacctgaggtgcaagcttagggcccgagaagtcactgtcactgtcactgtcagctgctgcagttactgttacagctgtgacttaggccctgggcttgtgggttcctggggtccaggctgtggagacccctcccacactgaggtcttagggtcaggctgatctggggtccccccggggctccgccacctgctgcctgagcaatgacagcctgccccaaggcccctctgtaacacaggaaggacagcatcatcctgacaatgacactcgccagacctggtggtggcccagagctgggcccgtaactgtcactgcctccttcatgtcagggacacctagcacagtggccagagagtggtgaggggtgagggttccagatcctctagccttcctgggtgaggttcccagcgtggaaatgcaagtgtctcagtgcagaccaagcatggggatctgggccagcaggtgggtctaggtgtgccaatgggagtgggcacatacccaggccacaggaaatcaaatcaagagggtgtgtgtgtgtgtgcacgcgtgtgtgcacgcaggcatgggctttcagggctttcagagcaggggccgacggcattctccctcgggccagcggtcagatgtggggttcaggaaacaaggcccaggtggggatgaatcacagggctgtgattctagaagggacagctgtgaggggccgggacaggctaagctggaggactcaccagacttgcgggggtcaacacgctccagatgtctcctagacctctcacactcagcacatccaaacctgaacccagcacctggccccacacctgtcccctggctagagacgggggcctcagcccagctgttccccttctcccacagcctctcagctgcgtgtcgggtccattctgcatcttgaacatctctcccagtggattcccttctgctgtcctggtccaggatccatcccagctctgaccaacgttctcctccctgacctcctgaataggaggaatacagcctgtctatccccttctgagtgcctatcacaaccaggaatagtggctatccagttacctgtctgcaatcagtctccccactgtcctgtaagcctcacaagggtggggcccagggctgtcacagtcactgctgtgtccccagcactgcccagtgccaggccaggcacacgcatgatgctcattagatctaagcttaacacataagtgagtcccgcctccagcctccttcccacctgccggccccagcctcacccctctgcaattgtcccccacgcagcaatcagaaggaattggtgagaagaaaagaacaaactggctgggcgcggtagctcaggcctttaatcccagcgctttgggaggctgagacaggcagatcatgaggtaaggagttcaagaccagcctggccaacatggtgaaacccatctccagtaaaaatacaaaaaattagcggggcgtggtgggaggcccctgtaatcccacctactcgggaggctgagacaggagaatcgcttgaacccaggaggtggaggttgccgtgagccaagaccacgccactgcactccagcctgggcaacaagagcaagactgtctcaaaaaaagaaaagaaaagaacaaacctaccattccccgtcgccccacccccaactcctgccgcaaataaaagtaacacatggcaagaaaacaaagtactcaaactataaaatgtaaagccaaagtcccctcctcagaggaaccctcaactactgcggtcgccagcctgttttcccctagcgccatctcctggacagcccatagtaagcatacctcactcatttctgagctcttcaactggaggtttgttcagatctacgccatcgttacctactcataatccagccccactatgaaaggtgagcactctgcccccatgcggcctgccctttctccgctcccccatttctacaggggatttgtatgcagtttttattattctatgttctgctgttttttttttttattttttttagacggagtctcgctttgtccccaaggctggagtgcagtggcatgatctccgctctgcaatgcagtggccatggaaacactctccagtgtggtgtgactaaggcagagaggagaccctctgagtgctgcttcatgagactttggtgcttttttttttgatacagagtcttgctcttgttgcccaggctggagtgcagtggcttgatcttggctcactgcaacctctgcctcccgggttcgagtgattctcctgcctgagcctcccaagtagctgggattacaggcgcccaccaccatgtccgactaatttttgtatttttagtagagacgggatttcaccatgttggccaggctggtctcaaactcctgacctcaagtgatccattcaccttggcctcccaaagtactgggactacaggtgtgagccaccgtgtctggcctaactccaacttcatgagagatcttaacctataattttccttttctgtaatgactttatcaggctttgatatcagtattctattggactcataaaatgagtaagtcagtattcctactttctctattacttaaaagaatatggacaatggtctttctttctttcttttcttttctttctttctcttctctctcttctttccctctttttctttcttttttttttttttttttttttgagatggagtctcgccatgctgtcccaggtggactgtagtggcacaatctcggctcactgcaacctccgcttcccgggttcaagtgattctctcacctcagcctcccatgtagctgggactacaggcacataccaccacacctggctaatttttgtatattttggtagagacagggtttcaccatgttgaccaggctggtctcgaactcctgacctcacgtgatccacccgcctcagcctcccaaagtgctgggattacaggtgtgagccaccgcacctggccccctccatttctctcttcctgtcttttcccaattcttcttttagatctcagctggactgtcccttcctccaggaagccctccctgaaccataggctgggtcagacacattctcaaggttctcaaagctccctgggcttaacacgaggccggccttaataaatggcagcaagacctttggagtcgcacagacctggactcaaatcctggttctgtcactttctggattcgcaagctgagccttggtgtttccttatcaaaactgggggtcaaaatactcaactgacaggattgggagaatggcaatgacagagtaagggagaaaatgctcagtttgtaaatgttaacctaatatcctcttcctgacttctgtcaggaattttattcctggaagtacatcctacccactggtgtgaatctactcttgggttacatagaatcgttttccgtctcctccctgaactctctccctccagactcactccctttcatctgtcttccataccggagaatcccaactcagatgtcccctcctccaggaagccttccctgacctccagacccctgggatcctctatctgagctctgactgctctgggtcctcactgcatggtgacaagtctgtctctccaactggactgtgaggccgatgcaggcaggacctgaggctaactcggtcactgcactgtccccagccccagataggcacagagcaggcacttaatgaaaaagctgatctgtggaggtgcccaggaggtgaccatggacaatgggtatggctcctgtctctggctcccccatctcccttctctctctcctgatgcttttggtgttatctgtcccctcgagaatgtggcactgtgcattgcccctcctcctggatttcctggattggctccaggccccctctacacatctgtctctgatatagaccctttcctcggcctcagtggctgtcatttctcagggcaccatttcctaagcccttttctcactcgactgtcacatctacttccaggggccactcagaacttcaggacccaaactcctatgctcagatctctctcagccccggagctccaggccacaggcacttcagacactctaggtcacaacacagtggctgaccaagcccagagagatttccccgggaaaggagggatatcttaacccactgaggcaagtaaagtgacgtacttggccacagttaactattgttcaagatttttctgagcatgaaactgcaggtggctggaatgcaaccctttcctcaggaaatgtgctgctaagaccaaacagctccctccgt[144 bp omitted]agaaaccctgtctctactaaaaatacaaaattagccaggcatggtggcgcatgcctgtaatcccagctactcgggaggctggggcaggagaatcgcttgaacctgggaggtggaggttacggtgagccgagatcatgccattgcactccagcctgggcaacaagagcaaaactccatctcaaaaaagaaagaaagaaaaaaaggacaaagcacctcttccccactattgggaacacgcctgcatacgatggctgcttccttgtaaaatgaagggaaggtattcctcatagggtccactactcgatggtgaagggtcgtcataaggacacagtagtgactgctagagcccacgatggcaagacggccatgacgaacatgctggctactgagaggctaaatcccgtggaaccggtaaccggaactgtatactagggaggagggagaggttatttaatatgggagagggaaaggaaaaacatcaaatccttatctttcatacaaggaagttggctgataataaaagatggggaagatcccagcactttgggaggccg[134 bp omitted]gaggcaagacaatcgcttgaacccgggaggcagaggctgcagtgagccgagaccatgccagtcagtgcactccagcctgggcaacagagcgacactccgtctcaaaaataaataaataaataataaaataaaataaaaataaaaaaatgaaagatggggaagaaataataaaagatgagaaaaaaatttccaaatgaggaatgtttagaaattctcttattagggccaggcattatggctcacgcctataataatcccagcacttaagaggccgaggcactggatcacttgaagtcaggagttcaagaccagcctggccaacatggcaaaaccccatctctactaaaaataaaaaattagccgggagtggtgatgcacacctgtaatcccagttacttgggaggctgaggcaggagaatcgcttgaatccaggaggcagaggctgcagtgagctgagatggtgctgcactccagcttgggtgatacagtgagactccatctcaaaaaaaaaaaaaaaaaaaagaaaagaaaaaggaaaaagaaattcccttattaagaaacatgataggccgggggcggtggctcacacctgaaatcccagcactttgggaggccaaagcaggtggatcatgaggtcaggagttcaagaccagtctggccaacatgatgaaaccctgtctctactaaaaaaaaaaagattagctgggtgtgatggcgcacgcctgtaatctcagctactcaggaggctgaggcaggagaagctcttgaacctgggaggcagaggttgcagtgagctgagatcgcgccactgcccagcctgggagacacagcgagactcagtctcaaaaaaaatataaataaataaaagaaatgacacctaaatgaacgtgcatttctggagaagatcctggaacaggcagaaaaggacaccagtggaaacactgctgagataggaatgaggcctgcaggctttataccagtgttcatttcctgggtcgcctcattgcattgtggttatgtaaaatgttatcatccggagactctgggtgaaaggtatgtgggaactctctgtacttttattgtaactcttctgtgggtctaaaattagttcaaagtagaaaaatgaaaacagaaacagcccccaggtggctcgactgtgaggaaatggaccttctcacccatttgctggtgtaagtgtaaatccttgcacaccctggagtcagtcattctgcttctgggcatttatgtcaggttcacccgtccaggtgggaaaggccttgctgggctccttaatcctgcagcatagtgtatgataacaatttttttgtttgttttagagtcggagtctcactgtgtcgcccaggctggagtgcagtggctcgatcttggctcactgcaagctccgcctcccaggttcacaccgttctcctgcctc[210 bp omitted]ccctctgacactataatctcacaaattccagcatttctgtcagcagctgaaatagagtaaggaagtcttgttttttgtttttgttttgagacagggtttcactctgtcacccagactgaagtacagtagcaggatcatggcttactgtggcctggaatcccagcgatcaaacagtcctcccacctcagcctcccaagtagctgggactacaggcgcacgccaccatgccctgctaatttttgtacttttagtagagatggggtt[132 bp omitted]ttttgtcatgttgcccaggctggtcttgaactcctgagctcaagcaatcggcctgtcttggcctcccaaagtgctgggattaccggtgtgcaccactgtgcctgaccaaaacagataattaaaacttttttcaaaaaaatcaaacaagccaccttggcccccaggattccacaggttaagcctatacctctgcacctctgctccctcctcaagacccaataaaatagcagtcctggaaggaaagacagcagaagccacaagaacaaagagaagcatcagggtgggggtgggggggttgggagggtatgcgactaggcggaaggggagggaatcaatgcaagccttgaggcgggagcagatggctgagaggtaactgagccagcagggaggctgctgagacctaggcaccctggaaggggggcaggtagagggaagaaggggagagggggaaagggcggtgacaagaagcagaaggaactggagactaggaccacacatgcaaagtgactgagggtggggttaagcccaggatccctccttgactgggggtaaaccaggaggactctgagaacagcccagggggcaagtgccacactgaaaacaagcctgttcctctggcatggggctggtgggcaatgcagacatcaagagcccactcagccttggccttgaactccagtaaccctgcctggtgttgctggggacaaaaccacacctgccactgaggtccagataggggctctgcttagctgtgagcctggccatgaggtgatgacgatgggaaggatctgggtcaaagacatcccagtggctcccagacccctgcttctctgtctccctccaaagccatttaaaaatacaccaactatctcttttttaagagtttgcattgttccctgctatctttgaagttccacctacattttactttctctataaagttttatcctaatgtgacttttttatgctcaaatgtcctatcataagtctctgaaacaaaaatgtatctataaattaaaatcaaaaatttcattctttgtgattttagttaaaacttttctcggccgggcgtggtggctcacgcctgtaatcccagcacttcgggagaccgaggtgggcggatcacgaggtcaagagatcgagaccatcctggccaacatggtgaaacctcatctctactaaaaataaagaaaaaaaaaaaattagctgggcgtggtggcacacgcctgtggtcccagctacttcggaggctgaggtaggagaattgcttgaacctgggaggcggaggttgcagtgagccgagatggtgccactgcactccagcctggtgatagagcaagactccgtctcaaaaaacaaaacaaaaaacaaaaaacaaaattttctcttggattgcattatcatgcaatttctattagtataccactgatcgaaactgcacgcattacataatttgatgtctagtggctgggcgtggtggctcacgcctgtaatcccagcgctttgggaggtcgaggcgggtggatcacctgaggtcaggagtttgagaccagcctggccaacatggtaaaaacccgtctctagtaaaaatacaaaaattagccgggcatggtggcatgaccctgtaatcccagctacccgggaggctgatgcaggagaatcgcttgaacctgggaggcggaggttgtggtgagctgagatcatgccattgcactccaacccgggcgacagagtgagactaacttttgtatttagtctaattacggctaatttttgtaattctagtagagacagggtttcaccatattggtaaggctggtcttgaactcctgaccttaagtgatccacctgcctcagcctcccagaggctgggattatagccatgagccaccgcgcccggccacaaaaagatttttaaattagctgtacgtggtggtgcatgcctgtggccccagctactcagaaggctcagaaaggaggatcacttgagcccccaggttcaaggctgcagtgagccatgatcctgccactgtactgcagcctgggtgacagagtgacacttggtcttaatcaaatcaatcaatcaatcaaatctgacaaagacatacaagaaaataaaattatagaatatgtcactgatgaccacagatgaaatctttaggaaaatattagcaaacgaaagccagcaatatataaaaaagataatatagcataatcaagtgggatttctgcaggaatataagattggtttaatattcttttttttattattattattgttttttgagatggagtcttgctctgtcgcccaggctggagtgcaaaggcgcaatctcagctcactgcaacctctgctgccagggttcaagtgattctcctgcctcagcctcccgagtatctgggattacaggcgcagaccactgtgccctgctaatttttgtatttttagtagagttagggctctgccatgttggccaggctggtctctaactcctgacctcagatgataatacccgccttggagtcccaatgagctgggattacaggagtgagccaccactcc[136 bp omitted]tgcctcagcttcccaaatagctgggactacaggcacgtgccaccatgcccagctaattttttttttgtatttttagtagagacagggtttcacca[146 bp omitted]attttactcctagataattactgggagaatttcatttctaccaagagaaatgaaaacatccatataaaggcttgtacacaaatgttcatagcacctttacttgcaataacttggaaacaacccaaatgcccatcactaggacagttattaaacaaagcatggcatattcatatactgtaataaaagaaaagaatacacttttattaagagtaataaacaaaataacaaaataaactagacaggcatggtggctcacacttgtaccccagcactttgggaggccaagcggtgaggatcacctgggcccatgagttcaagaccactatcggcaacttagtgagatccatctctacaaaaaataaaataaattagccgggcatggtggcatgtgcctgtggtcccagctactcaggaggctgaggcaggaggatcgcttgatcccaggaggttgaggctgcagtgagccgtgtttgtgccactgccctccagcctgggtgacagggggagaccctgtgtcaaaaaaaaaaaaaaaaaaagaagaagaagaaatgaactattgatacattcagcaagaagtatctcagaagtatcaaatgaacaaaagctaaacataaatttcatagtgtatgattccatttatatcaagttgaacaacaagcagaactaatcaacaaggagagaagtcagataaggagacagagcaggggaggagggacctttctagagtaatgacgatgttttatatcttgggtactagttacatgggtatatgcatgtaccaatactcattgaactgtagcctttagatctgtaccttgcattgtacagatactatatctcaacaaagaatataccaaaaaaatcaagtgccaataattaaacataagaggaggagtttgggagccagtgggatatgacttcttatcctgtactgcctcagggaacctgtttctctcgctttgagagatttcctcactcataaaaccaggatggtcataaactccctaaataaggtggttaagatcatttgctgagataatggaaagcatattaaataaaagctgttattatcagtcaataaattattattcagggtaaacgtagcttcaagccagtctctgccctggttgcacttccccagatgtgatccagtcagatgatgatgatgatgacaatgattattactgttattttgagacacagtctcactctatcacacaagctggagtgcactggtacgatctcagctcactacaacctgagcctccaaaggtcaagtgattctccagttttagcctcccaaaatgctggtattacgggtgttggccaccccacctggcaatccagtcaatttatttatttattttgttatttatttattttttgagacagagtcttgctctgccacctaggctggagagcagtgacacaatctcggctcactgcaacctctgcctcctggtttcaagccaccctcctgcctcagcctcccgagtagctgggattacaggcatgccccaccacatctggctaatttttgtatttttagtagagatggggtttcaccatgttggccaggctggtctcgaactcctgacctcaggtgatccgcccacctcggcctcccaaattgctaggattacaggtgtgagccactgtgcccccgcccaatccagccagttttaagcttgccctaacagtgctccaagtattaacagaattgtgcaggccgcaataggcagtgcttcctcccacagacctggcttgatctttccattacagcaacccgagactgcagtaacacacaatgctccagttaccagaggggcatgactggttccatctgcccagcatcctgggggatcctatctccccaacttttggttcaagggattcaggaggaggtaaccccactcctgagcctggccaattagggcactgctttccctgggccacagagacggtgctgggatggggatgtgacgcagggtggaccactggattcagcctgggaatttggcaggaaatccgggatgaggcacccctctgtgccctggggtcactaggcaggtaactaataccctcaaatgtgccccatgagagcaaggatctttgttctgttgactactgagtcatgcctcttagaacagttcctggcacacagcaggcactaaataaagatttgttgagtgaatgaattactcagcctcctaatggactgaagcatagccacaccccagaaaatgatccccacctctactctcctcccaggcctggagagaccaactcaacttggtatagaggatactcagggg[131 bp omitted]gccaacatagtgaaacaccgtctctactaaaaatacaaaaattagctgggcgtggtggcgggcacctgtagtcacagctattcaggaggc[137 bp omitted]gtctgattaccagtgctactttatattattctctactgtcttagtaattccatcctccccacctccattagagtttagaagccgatactcaccactgcaacctcccatacaccaaggggtgggaggtgacccggttgtggtaagctggcagtgaggggagtttcctgggggcttctggaaaaggattttcctccttgaagcgttaccctcacttacctgaccacccgcccctccatacacacacgcatagacttcctcccttatgaaacataaaggcacaatgcctggagccgcagcagccctactgaggccatgaggactgcctgagcaccaacacagcagagatggagtcctcaggttcccaatgacaccactgagccaccaaaccaaccaagaacaggccttcctcagggcttactgaaaagccagcaaaaaacacccttttgatttaaggtttgattgacatttactggctgggttttcaattaattacagatgagcacaaactaatacagagatacaccggggtcaatgaccgagatggcctctggtgctttctcaggcaggcgccatccccaggctgacacgggcgccctctcctgtccacttggcatattgcttgcagccagcgcaagtagattccctgggatgcactcaggttgcaaatcagccagccctctacacaggggcttctgaaaaagatccctgttcagaaatcggccagaagatttagccatgagtacatgagcaaattccagcaaatgcctctgcataatgaagggtgggactaaaaaaggagcagcgagattaaacgcagccaatgacacacttcttccatctgagactatgtgccttagttaggtctttgccagctgtgacagccacatacaaagaatgtcaaagctggctgggagcggtggctcatgcctgtaatcccagcactttgggagactgaggtgggcagatcacctgaggtcaggagttcgagaccagcctggccaatatggtgaaaccctatctccaataataatacaaaaaaaaattagctgggcataatggcacacccctgtaatcccagctacttgggaggctgaggcaggagaattgcttgaacctgggaggtggaggctgcagcgagctgagattgaaccactgcactacagcctgggcgacagagtgagactccatcttggggaaaaaaacaaaaacaaaacaaaattagccgggtgtggtggcagaagcctgtaatcccagctgctcgggaggctgaggcaggataatcacttgaacctgggaggtggaggttgtagcgagccgagattgtgccactactctccagcctgggcgacagagtgagactctgtctcaaaaaaaaaaaaaaaaattcaaagccagactctcacagagggtttcaccaagagtttccaaatttacttaataatgtctgcataggaaaatgttttcggtgacagcaaaactatttggggggggggggcatgaataaataagtttattttaaaaatttttatgttcgtttcatccctctaatttttgtgtatgtttttaaatgcatataatataaccatactattatatgttagcgctatacatgactgctaaatactttcatttatttatttatttacttattttattttatttttttgagacagggtcttgctctgtcgcccaggctggagtgcaatggtgcgatcttggcacaccgcaacctccacctcccgggttcaagcgatactcttgcctcagtctcccaagtagctgagattacaggcatgcgccaccatgcccagctaattttttgtatttttttagtagagacggggtttctccatgttgttcaggttggtcttgaactccccgcctcaggggatccacccgccttggactcgcaaagtgctgggattacaggcatgagccaccgtgcctggctgactgctaaataattttacatatgtgtacacacgtgcatacatatatgctagggaaggaacctcagaagtgtttccttgataggagaacataataataaatgtttggaggtcaccagcagcagcctggctgccatataatataactgatgtgacgctctggtgattataaataaactccagcaaagtgattttcaaacactggtgcgtgtgagaatgtactctagagactgctaaaaataaacacgtccaccccttccctacgtccaccaaatcaggacctgcaggtagcactcctgggcatctactggaagtgccccagaaagctcactagttttcctccatattgtgcacctttcagctccccaatcctcttggcagttgtgtttaacctggtggttagttagcccttctattgagagctgaacaccaactgttgtagctgtcctttctagaagttttgtttaattctttttccagcttcctggcaatttttcattttacttgtgttttaatatccttctcttttatcctcttaacagataagcttaggtattttatatccacatctgataattccacgtttgcaggctgtgacctgccatgtttttctgctggctctcgctcatggtggctgcttttttcatgtggtgtatatatatatatcaatatatattgatatatatatatattttgtatttttagtagagacggggtttctccatgttggtcaggttggtctgatatatatatgagatatatatatatctctcatatatatcgatatatatgattatatatctcatataaataaaaaataaaaatatatatagtatatatatcgatatatatctcatatatatcgacatatatgagatatatatcgatatatatctcatatatatcgacatatatgagatatatatcgatatatatctcatatatatcaacatatgagattatcgatatatatcgatatatatcatgatatatgtatatcaatatatgatatatatcatatatcatataataatcatatatatcgagatatatgagatatatatcatatatgagatatgagatatatatatcatatgatatatatatcatatatggatatatatcatgatatatgtatataaatatatatattgatatatatcatatatatcatgatatatgtatataaatatatatatcgatatatatcatatatatctatatgagatatatatctatatatatcatactatatatatgatatatctcaatatatacctatatatcatactatatatatagatatatatctcgatatatatctatatatatcatactatatatagatatatatatcatactatatatatagatatatatctcgatatatatctatctatatatattttttttttactgtgagcttgtatgtgctggaactctatctgaaggatttctccaaggcctgggcagagagagcacaggcaggaagagtttatgtttgcccttgccaggtgcttagatacaattaggtacccctaggggttcattctcagcctgcaacttccaggacctttcaaagaggccccaagcccacatgagggacagtcagtggctacaaattctcagaggagaatgtatcagtctctacctagggcaaagcttgtgtgccttcagacggaggtttttttctagttcaccaggtaccttgccagagacctggttctacacaaggctgttgcctgcccaattcccccacagcatagtccccatcccccaggccaagtgatacggtgtggctgtgtccccacccaaatctcatcttatattcacacgtctcactaaaaatacaaaaaattagctgggcatggtggcacatgcctgtaatctcagctactcgggaggctgagacaggagaatcacttgaacccaggaggtggaggttgcggtgagctgagatcacgccactgcactccggcctgggcaacaagagcgaaactctgtctcaaaaaataaacaaataaaatgaataaataagtaaataaacatgtacagagtacttgagggccaggtacagttctatgttttatggatcttaatatccacataacaacccaattacaagcataaaactgaggcccagagaggttaaataactctccctggggtcacacagaaagtggcagagcggggacagataagcaggcagcctggttcgaggccgcgctgcaaacagtaaacagtaaacactgtttactgaatggtgctgagggaacatcagaactatgaggttaagtgctattcggtacagaaaggcagagggactcatgcaggacacacaccacgtaaacagcagggcaaggatctgagtgcacgaagtctttatctagaagcagaggttttggcacttgggcagtaatgacaagaagggattccggctgggtgcggtggctcacgcctgtaatcccaacactttgggaggcca[134 bp omitted]aaaagcctg[221 bp omitted]ctgagaggcaggagaatggcgtgaacccgggaggcggagcttgcaatgagccaaaatcgtgccactgcactccagcctgggcgacagagcaagactctgtctcaaaaaaaaaaaaaaaaaagaaaaaaaaaacggattccatgtataccccctgtagcctgtagtagcaaccagatgggcatgtcccgggccagggctcgcctatccactatcctgctgcatcctcacaagaatcctgggagataagttctattagtatcccatttgataaatatggaaatggaggctcatagaggtcaagctgcctgctcaaagtcacatggctaataagcagcagtgccaagatccgaagccaagagtgcctactctgtggcagactgtgccatcagggaccccttcgtatcacaccctgtgcagttctttcccacacccactgtggtctgtgcctggagctgctttgaccaatagtgtggtggaaatgacgctggaagattccaggccttgcccttaaataacctgcagcttctgcttcttccctcatgaaaatctggctgttggggagtcctgagcagccatgtgagatattcagctaccctgcaggaaagaccacgtggagaagagaggcccagaggctacgctgagagggaaccaactccccagtcccagtgccagttccagatgactccagcccagccacctccacctgcacctggatgagagcctgccaagcagcaaccagcaaaagaactgtccggctgagcccaggcaagccacaaaggtaacagaaactaagagtgactgggttttttgtttgtttgcctttttgagacagggtcttgctctgttgcccaggctggagtgctgtggcacgatctcggttcactgcagcctccacctctctcaggttcaagcgattctcctgcctcagcctcctgagaagctgggaccacaggtacccgctaaatttttgtatttttagtaaagaaagggttttgccatgttgcccaggctagtcgcgaactcctggcctgaagtgatccacccacctcaacctcccaaagtgctgagattacaggcatgagccactgcacctggctaagagttactacggtaagccaccaagctttggatcagatggctatgtagaaaaagaaaactgaaaccaagtccatggcctaaattcataagaatggccacagagctgagcacttctgaaaaaatgacctcagcaacctgaatgaatgatcatggtgtatctgtttcccacggccactataacaaactaccacaaatgcagtggcttaaaacagcacaaattattattattatttgagacagggtcttgctctgtcacccaggctggagtgcaggggtgcggtcacagctcactgcagcctcattctcctgggctcaagcaatcctgccgcagcctcctgagtggctaaaactataggcatgcatcaccatgccccactaattgttttttatttttagtagggacaaggtctcgctttgttgcccaggctggtcttgaacccctgggttcaagtgatcctcctgcctcgaccttctaaagtgctgggataacaggcatgaaccaccgcacctgccctaaatttattattttacagttccagaagtcagaagtctgaaatgggggccagttgtggtggctcacgcctgtaatcccagcactctgggaggccaaggcgggtggatcacctgaggtcaggagttgaagaccagctggccaacatggtgaaacccccgtctctactgataatacaaaaattagggcatgcgcctgtaatcccagctattcaggaggccaaggcaggagaatcgcttgaaaccgggatgcagaggttgcagggagctgagatcatgccactgtaatccagcctgggcgaccatgt[137 bp omitted]atggtgaaaccctatctctactaaaaatacaaaaaattagccaggtgtggtggtgggtgccaggtgtggtggtgggtgctactcaggggactgaggcaggagaatcgcttgaacccaggaggcagagattgcagtgagttgagatcgtgccactgcactgcaatctgggcaacaagaatgaaactccatccccccccccccaaaaaaaaaagtccaaaatggctttcactaggctaatctcaaggtgtccgcagggctgtgttcctttctgaagtctccagtggagaatccatctcctcggcttttccagcttccagaggctgcccgcattccttggctcatgcctcccttcctccatcttcaaggccagcggggcagcatccctcaaatcattccctctcttgcctccctctttcccttataaggacccctgtgatcacactgacctgacctgcataattcaggatcatctccccatccccaaatccttcatttgatcacatttgcaaagtcacctttgctgtgcatggtaacatattcaacaggttcttgggataaggatgtggacatctttgggggaccagtcactctactgcctactgtgtgtgataaaccagaaaaaggaccagtgcgcgccaaaggaataaacacagatgagctggaattttcctactgcccagagatatctcacagcctccctgggagcaccaaaagtgcactttgcaggcatggcctcaacctgcctaacatcaccaacctcctttacttttgggttaaaataatttaaacaaaggaattctgtgtttaaaaagatctttgcctccccaacagggtgcatcatcgatgatttatgcttctagcatgtactgttctttcctcaggcagccacagctactgctccagcctctcctgtgagacagctgggcgcagcctgctgagtcaaaagtatctcagccaaaggtacagatactggatttgctggtcagctcaggacgcctgacctgagagaaagcagggccgccagtgcaccctgggaaattccaatcaccatggctgggggccacagcaaagggcaatcagcagtgtgaagacactaatgatgtaattaaaaggtgtaaatgtaagaagccagtacattgcaatatctggtagcatctccaactcgacctgtccctaactgagctccaggtctttctgtccaacctgcccctcctccagtcggctgtctcacacccaatccatgggaaatcctgctggctctaccttgtaaacaaatctactggttattcattactaagaggaaaaggaaaggttcttgacatggttacaccttaaccaagcgatccaaatcaccatcacaaatgacagaacaaatagacctcaggagtcccctgaagggatgtccttaggaggcacctcgagtctgtggtgttcccgccaaacatgttcaacatgaatccaatcggggaagcaatcaggagactccagacatcgggacacactatcaatcagaggactggctccaatgtcaatgtcaaaaaacaagggcagggatactattctagagcagggtcagaaaactcttcctgtaaaggggcagagagtaaatattttagattttgaggccaggcgtggtggctcacgcctgtaatcctgaaactgcctttgcaaaattatgactgacacagcaaaagagatctaacttgactgactccatcttacttccaacctccaagctgtccttgttcattcctgagtgaaggctgaactaactttgggagaaacttagtttatagtttaaacaaacatggtaacagccctttcccaaagcagacctccttcttgcctggtgactagattgcctttgtaggactaacattagccacaagattagaaattatggtttaggagtcatgcagctggaggatacaagattctgaccctccctaaactgctcctaagatcagtgcttgagatattctgcagactctgcacttgatggatcagctggccccacccagatcaaaaaattggctcatctgatcttgtgcccgccctccccctcccccaccgccacccaggaactaactgagcacaagacatctctgaattcctatgatttcatctctgaccaatcagcactcctggctcactggcttcccctcacccaccaagttatccttaaaaactctgctcccgggccaggcgtggtggctcatgcctgtaatcccagcactttgggaggccaaggcgggcagatctcctgacgttgggagttagagaccagcctgatcaacatggagaaaccccatctctacttaaaatacaaaattagccgggcgtggtggcgcatgcctgtaatcccagctactcgggaggctgaggcaggagaatcacttgaacccgggaggcggaagttgtggtgagccaagatcacaccattgcactccagcctgggtgtcggagtgcgactctgtctcaaaaaataaaataaaataaaataaaacagaactctgatattgtccttctgctgcacagaaccctccagtaagtcctgttccactcagagtaaagccaaggcatttgcagtgacccacaggccccatacaaactgtccccctttcccgtcatcagtttcctctgtcctgtgtgccaggcacgctcatgcctcaggtcctgtgtgcatgcgggatcctctgggctggaacgtttcttcccccagatggcaatgctgctcgttccctccctccttggcatattttcagtgagttctccctgacaatcctatctaggcttatagccttcctttaaatactccttgttctacaaccctgatttttttcctagagcaattattgctatctaatatacttcatcttttaactattttttgagatggaatctcactctgtcacccaggctggagtgcagtggtgcaatctcggctcactgcaacctctgcctcttgggttcaagtgattctcctgcctaagcctcctaagtaactgggattacaggtgcctgccaccacacctggctaatttttgtatttttagtagagatggggtttcaccatgttgcccaggctggtctcaaactcctgacctcaagtgatgcaccagcctcagcctcccaaagtgctgggattacaggcatgagccactgggcccagccaactatttatttcatttattgtctggcttcctccacaagaatgtaaggtacctgagggcaagatgttttgctttttcctgcctgttgtatctataacatctacgtgacagccatgaccctatgccaggcactgacttaacattttatatccatttacttaatcctcaccacaacacaataaatattatttacagcataatgcatacatagtatatacacaaaataataataataataataatagtatctacctcatcataactggtgaggacccagtgccagaggctggaaggtgctgcagacaagccgtggcacaaagtacaagcccagttaatgtgaccattacataatacccaatgtacagaatcggaaattgaagctaagaggggctaaatgacgtacccaaagtcaccagtctgggtagggattcaaacctatgtcagtctgactccagaagccattttctttctttttttttttctttttttttttttgatatggagtctcgctctgtcacccaggctggagtgtagtggcacgatctcggctcactgcaacctccgcctcccatgttcaagtgattcttctgcctcagcctcccgagtagctgggattacaggcgcgtgccaccacgcccagctaatttttgtatttttagtagagaaggggtttcaccatgttggtcaggcaggtcttgaaatttgacttcgtgatctgcccaccttggcctcccaaagtgttgggattacaggcgcgagccactgcacccggcctttttttttttttttttgagacagagtttcactcttgttgcccaggctggagtgcaatggcgtgatctcggctcactgcaacctccacctcctgggttcaagcgattctcctgcctcagcctcccgagtagctgggattacaggcatgcgccaccacgtctggctaattttgtatttttagtagagacggggtttctccatgttggtgaggctggtctctaattcccgacctcaggtgatctgcctgcctcggcctcccaaagtgctgggattataggtgggaggcaccgcgcccagcacagaagcctatttatttatttatttatttatttatttatttattgagacagagtctcgctctgtcgcccaagctggagtgcagtggtgtgatcttggctcactgcaacctctgcctcccaggttcaagcaattctcctgcctcagcctcccaagtagctgggactacaggtgtgcgccaccacacctgcctaattttgtattttgagtagagacagggtttcaccatgttggccaggctggtcttgaactcctgacctcatgatccacccacctccgccttccaaagtgctgggattacaggcatgagccactgcgcccagctccagaagccattttctaaaccacaacgctaagaatgtcacagtgtttggaagacaggcagagacaggaaacaaactgggtctaggaattcagtgtccaaagtttcgcctctggcacaaatctctgcgtatgacctgagcaattaactgctgccctcaacacctccattttcccttctataaaccagaggaagtcattcctctttccggacatggggacaaaacagttgtgggggtcaaatgagatggctaacaggaaagcactttggtaactgtgaaatctaatactttcccattctaagagctgcagccccaacaaagaccccaccaaacaccgaacaaccaagaattccgggccctggaaagcaaactttaagcatccaaacttacagagggggaaaaaaagtgcactcccttaatcatgtgggctttgtgtgtgctcctccctctgccccagtgctttccttacgccttgtcctggtgttgtcctcacccttcaggtcccaattcagatgtctcctctgccaggaagccctccctgaaccccatgccatgtcaggtgcccagtgggctcccccatctcagctctgcccactgttgggggatacgtctgtcccccgcaggactaggaattccttgagggcacagattggtgctggtttggtccctgctgtttcgccagcattgccagcacaaggcctggcacagggcagaggctcacaaaataccagctaaaggaaataatgaatggatggagggatgaatggtgtgtaaccgcccaaggagttcaccttgcccgctgcctagacagagctgattcatcaagagaggagaactgcaagacaaagagtaattcacgcagagttggctgtgcgggagggtgttttgtttgtttgtttgagattgagacagtcttgctctgttgcccagactggagggcagtggtgcaatctcggatcactgcaacctctacctcctaggttcaagcaattctcctgcctcagcctcctgagtagatgagattacagatgtgcgccaccacacccagctaatttttgtattttcagtagacacgggttttcaccatgttggtcaggctggtctcgaactcctgacctcatgatccacccacctcggcctcccaaagtgctggaattacagacgtgagccaccgcgccccagccaggagtcttaccattactcaaatcagtctccctgagcattcagggagattttatttttattttattttattttttttttttgagatggattttcactctttcgcctgggctggaatgaagtgacgcgatcttggctcactgcaacctccatccccgggttcaagcgattctcatgctccagcctcccgagtagctgggattataggcgcccgccaccaagcccgcctaacttttgtatttttagtagagacggggtttgaccatgctggccaggctggttgcaaactcctgacctcaggtgctccacccccctcagccttccaaagtgctaggattacagatgcgagccaatgggcccagctggagcagagtttttttgttttttgtttttgttttgagacggagtctcggtctgtcgcccaggctggagtgtagtggtgcgatctcggtggagcagagtttttaaggataacttgatgggtgaggggaagccagtgagccaggagtgctgattggtcagagatgaaatcacagggagtcggagctgtcttcttgcgctcagtcagttcctgggttggggggccacaagatcagatgggccagtttattgatctgggtaaggccagctgatccatcaagtgcagggtctgtgaaatatctcaagcactgatcttaggagcagtttagggagggtcagaatcttgtaccctccagctgcatgactcctaaaccataatttctaatcttgtggctaatgttagtcctacaaaggcaatccagtcgccagacaagaaggaggtctgctttgggaaagggctgttaccatgtttgtttaaactataaactacaaactaaatctctcccaaagttagttcagcctttgcccaggaatgaacaaggatagcttggaggttagaagcaagatggagtaagttaacttagatctctttcgctgtgtcagtcataattttgcaaaggcggtttcagtggttctctgacccagccaatgatgctaaattcccttattttatgtcccacgtagcacaacacagatcaccttttttttttttggagacggagtcttgctccgtcacccaggctggagtacagtgttacgatctcggctcactgcaagctccgccttccgggttcacgccattctcctgcctcagcctcctgagtagctgggaccacaggcgcccagccaccacgcccggctaatttttttgtatttttagtagagatggggttt[144 bp omitted]agccctttatttctatttattattttttgagacagtcttgctgtgtcgcccaggctggagtgcaatggcacaatctaggctcactgcagcctccacctaccaggttcaagcgattcccctgcctcagcctcccaagtagctgggattacaggtgtgcgccaccacacccagctaatttttgtatttttagtacagaccgggtttcactatgttggccaggctggtctcgaactcctggcctcatgtgatccgcccgcctcggcctcccaaagtgctggtattacaggtgtgagccaccgcgccggaccttactatgccctttagatctgagctcgggcggccccctctaggcagccctgctggcctcaggtccctgggtcagccagttcctctgagctccggggctcccactttcccgaccactctgggttgacagtgatggatcaggagtatatctcccagtgctgagcaaaaaggccgcatagtctgtcaaccgaatgaaaggacggcgtatgagcgcattaatgagtacacagatgaatgtcctctctggctcaaagtccttttccggattcccaggccatgtctccagaacccagacttcacccccgaaccatgcccctaatccagacttattgactacagtaaaactgaggcacgtcgacgtcctaaacggaggatatacaagcacctcctagatcagtggggaaactgaggcacacggtgccgcttttgaaatgaagttgcccaaggacagccgggcaaaggaccccgtccggtttctcctcagcccctcccctagctcctctatcctggaaagccccgtccaaatttctcccatctctcacactattggtttaacagggcatcagtctccaagcgctctcttcctttatcggctggcatttcctactcgcgtggtggctccttgacccgccccttacgccccgccccgccctcactactgggccacccgtacgcccctctatcagaaaccccccactattggccactggactttgccggttcgggctgtgattggtcgtagacagaagtccatcccctaagcaaccacctgacaggggttggagaaaggaaaaaggttggagggaattcgggtcagactcacgttgagccggcgggaggcagatataggtcttgaagaactcgcttcggcgggcggcctccttaatacggttggcaagcggcttgctgacctgccggatgcccaagtatagcagcttcgccatagggaacgcgcccaccaccatcttggcggtctcacagggcacgcgcaaccttgctgactgggcggggcgcctcaacctcttcactcctcccccgccctctcgtggccatgcgtgcgtcagtacgtatgtacgtacgctcgagggaaacttcagaggcgcatcctgacgtcaccccgtcgacgctggcgtagcgacgtccgttcgctgaatatgcaaatatacacggaagtgaggcgggtcagggggcggtgccgttaaacggatgctggaaggcgtgtggattcccacgcccgccttggccaacgtcactgtactccttcgtgatgtcacgttccgagttggcgtccccacccaaaggaggctcttaattagtcctaattagtcctatgagccccaaatacaccttcctctgcaagctagggctctcattgggattaagaggaagccgcgcggtcatacagactttggctgggatcccagctctgccatttcctcgctgtgtaatattagatgagtggcataacctctctggacttcagtattaccgtctaccaaatgggaatcctaatagcagttgcctctttgggttgttgtgaggcttctatgctaatcttgagtgtaaaacagtggaccatgggaagtggttagaatggtgccattcatatagttaagcgctcagtaaatagcccttcttactatacaggtcatgattgcattattaatgctaaatccagcctgagggtgcatttcacccccagaagcagcgaatccaaccctttcccaagtaactgacaaggaaactgaggcccagagcagggcagggggtggcacaaggttcctgcagaggttgatagcctggcatcttggccaataaaaccatacccgttctcaagcaacccaacttccttcattaggaggtaggttccccagggagctagttcagaaataaatttaaggacatgtcccagactgtcctttcttacccagcagggagtaaaatcatataaacaatgtcaggaaggggttgagagaaattcctggatgatggagtgctgatgggtaattgagagat[135 bp omitted]catcgtgaaatcccatctccactaaaaaaaaaaaaaaatttagccgggcatggtggcgggcacctgtaatcccaggtactctggaggctgaggcaggagaatcgcttgaacctgggaggtagaggttgcagtgagccgagatcacgccgctgcactccagtcttggcgacagagcgagactccgtctcaaaaaaaaaaaaaaaaaaaaaaggaaaacaggaacagaggagtggtgtgtaggaggaaacatacattcaggacacagaatcagggggctctggacttctttggtatccagtctgactctctgagtgtcctttgtcaagctcctggcactgagggacctgcgtttcctcatctttactgatggtgctggtgtgtgtgtgaaccctgatattctgaattactaagaatgccaggattccataaaaacaaccttttccagggtcccttccacacggaaggtatgcagaaacttgggactacctaaggtccatcatccatttgggaccagcccccttcccattttacagatcgtttgagcctgggaggttgaagctgtggtgagccatgagctccactgcactccagcctaggcaacacaa[136 bp omitted]cacgatgaaaccccatctctactaaaaatacaaaaaattcgctgggcgtggtggcgcacacctgtaatcccagctactccagaggctgagacaggagaatcacttgatctcgggaggcggaggttgtagtgagccgagatcgtgccaatgcactccagcctgggtgacagagcgaggctctgtttcaaaacaaaacaaaaaaaattggccgg[131 bp omitted]tggtggcgggcgcctgtagtcccagctactcgggaggctgaggcaggagaatggcgtgaacccaggaggcggagcttgcagtgagccgagatggcgccactgcactccagcct[155 bp omitted]tctactaaaaatacaaaattagcagagcgtggtggcacatgcctgtaattccagctactcgggaggctgaggcaggagaattgcttgaacccaggaggcggaagttgcggtgagccgagatcgcgccattgcactccagcctgggcaaccaagagcgaaactcagtctcaaaaaaaaaaaaaagagagaaaagaaaaattctggccccatcacctccattcccatagctttacagcagtgggatggggtgggaagactactaggcctcccagatcccaggcctccctctcttctctagccctccagcccaccaacaccaaagccctgatttccgccatctctgtgctccctccaccccagaaaaatcattgagtgcatttttccccctattcctctcctccttcttcctttctctgagaagggttcccgggaaagtcttctgggaacctttgtgaagggagaggagggcccgggggagcggggtggtaggagggttgtgagtgaatcttcacacctcaggagtctgtttacacacccgtaaggaggaagaggagaggagaccttctctgaagggtgaggccttttcagagctgggtgcttcttcctgctctccagcctggtcatggaacagtggccattcctggtgacccctgagaccaggggagggagggcagccttggccatcctggggcatgggaacacaagcagagatggggaggggagagggaacccaagatggctccagcgctgactcaccagccatgggaccttggactggttgcctggcctctctggtgaccgccctagactagggcctgggatccttcctggaagttttttctgctcacagcccctagtcacccttttcctggaatgagtgaggtactcgtgtttcataatccctctggcccctgtgcttcttccattaaaataaatccaaggctgggcacggtggctcaagcctgtaatcccagcactttgagaggctgaggtgggaggatcacttgaggccaggatttcaagatcagcctggccaacatggagaaaccccgtctctactaaaaatacaaaaattagccaggcgtggtggtgcatgcctgtaatcccagctactcaggaagctgaggcacaagagttgcctgatcccaggaggcggaggttgcagtgagccgagatcctgacactgtactccagcttgggcaacagagcgagattctgtctcaaaataaataaataaacaaacaaaaataaaactccaaaagctgatcactgctccttgttaaatccacaaccaccacccacccggcccaactgacagcacctccctcttggactcctgcagtcacctcctcactgggc[134 bp omitted]ggtctcagcctaccaagtagctgggactacagacacataccaccatgcccggctaatttttaaaatttctgtagaaactgggtctccctatgttgcctaggctggtcccaaactcctggcctcaagcagtcctcctgcctcagcctcccaaagtgctgggattacaggcttgagccactgtgcccagccaatctcccatattctactccccactcaacagcccgtgggatactgttaatacttaagtcaaatcaccttcatcctctactgagaaccccctcatagctcccatttatctcagattaaaaggcagagtcctcactaggatttacatggccccacacgacctgctgtcccctctcttgtctcatttcccctttcctctcgtcctctctacctcctctccagccacactgccatacctgctatctttcaaaattcagacactctattattattatttgagatggagtttcgctcttgtcacccaggctggagtgcagtggcacaatctcagctcactgcaacctctgcctcccgggttcaagcgattctcctgcctcagcctcccaactagctgggattacaggcacccaccaccacgctcagctacttttttttgtattttagtagagacggggtttcaccat[137 bp omitted]tgcagttccctctgcctgaaatgctcttcccacaacagccacaaggctgagtgccgcccatgcttcaagtctttgctggaaagccacctcagcaagcccttctctgccctcctccagatcagactccaagtcatcctctgttccctcaactggctttacatagaaaaatgtccccttcccatttagcaattccaaacattacatattttttatttacttgtgtatggtgagccctgtgaaggcaaggccaggctgcctcagtcattgttgtgtccccagccccacccagcacagtgccctacataaacctctgttgaatgaatgaataaataccctttcttcttgtcccacaccttcttcccaaaccttctggcatcactcctccaggcagtctgccctgattgcccttcacttgagttctgacattctccctcttcatcctcagtcttgacttggagatcgctgtttatctagaaacttagaattgcggtcttatgttccctggcctgtatgaccaggggctttgcaaacataatgactctatatcggctgcatttctccttccactttcccccgagtcacagacttttatccacttgttggaaaaaaaaaaatctaaccttctctatttgtctttattttctggaaaccaaatgtttgacttaatttatctggccagacatggcggctcacatctctaatctgagcactttgggaggccaaggcaggaggatctcttgagcccaggagttcaagatcagcctgggaaacatagtgagactccatttctacaaaaagtacaaaaattagccaggcatggtggctcacatttgtggtcccagctactcgggaggctgatgtgggaagatcgctggagagcccaggaggtggaggctgcagtgagccacgactgcactactgcactccagcctgggcaacacagtgagaccctgtctccaaaaaaatatatttactcatctcctccttcaggaggccctccacaatcgccaaactgtgatgggatctgggagcacaaaggttgaccagtgacacaccaacctcactcttcctaagttcttgtattcttatgaatattaacacagccctttttccatacaatttgcatacaccagaccaggagagaagggactgtgggatgagaggggaaaactggggattctgtgccactcggggttcattgtgctggcggcagcatcttcagctgcacctggtccccctgggagggcggagtggccgcccagctgccagtcatggctttggctgtgctgttcctcttggaggtgagtggggtctccagggtgagcgaggcattggccatctcctggggcttgtcgctggccagaaagcggagcaggttgtgcagggccttggccacatcgctgcgggcgccctcgttgaccaggcagtagaggatggggtccgccacacagttgaggctggtgaaagccagtgagctgtggtatgcagaaaagacgcgctcctcgaagccgcagtcccaggggcggcccaggtagatggcgctgcgggacagcaagagcacgtgatagggcgcaaagcagaccagcacgatggcgatgaggctgagggccagccgcttgatcttggccttctcctggcgctcggtggacacgctgccccgcacggcccgcaggatgccccggtacgacagcagcatgagcgcccacgggaagaggaagcccacgaacacccgatagaggttcatccaggccacccagccttccatggggaacttctcaaagcagaaggtgtggttgtagcggtctcggaagagctcgtcatggaacaggggcgccgagttggcgcccagctccgtggcccagaccacggagctcacggccacggcggtcttgacgcggcgc
